(19) United States
(12) Patent Application Publication
(10) Pub. No.: US 2024/0216501 A1
(43) Pub. Date: Jul. 4, 2024

(54) NEOANTIGEN ADJUVANT AND MAINTENANCE THERAPY

(71) Applicant: Gritstone bio, Inc., Emeryville, CA (US)

(72) Inventors: Raphael Rousseau, Los Altos, CA (US); Andrew Ferguson, Hingham, MA (US); Karin Jooss, San Diego, CA (US)

(21) Appl. No.: 18/607,027

(22) Filed: Mar. 15, 2024

Related U.S. Application Data
(63) Continuation of application No. PCT/US2022/076678, filed on Sep. 19, 2022.
(60) Provisional application No. 63/320,685, filed on Mar. 16, 2022.
(60) Provisional application No. 63/281,027, filed on Nov. 18, 2021.
(60) Provisional application No. 63/245,663, filed on Sep. 17, 2021.

(51) Int. Cl. A61K 39/235; A61K 9/00; A61K 31/4412; A61K 39/00; A61K 45/06; A61P 35/00; C07K 16/22; C07K 16/28; C12N 7/00

(52) U.S. Cl. CPC A61K 39/235; A61K 9/0019; A61K 31/4412; A61K 45/06; A61P 35/00; C07K 16/22; C07K 16/2818; C07K 16/2827; C12N 7/00; A61K 2039/507; A61K 2039/54; A61K 2039/545; A61K 2039/55555; C12N 2710/10321; C12N 2710/10334; C12N 2710/10343; C12N 2770/36134; C12N 2770/36143

(57) ABSTRACT

Disclosed herein are compositions that include antigen-encoding nucleic acid sequences and/or antigen peptides. Also disclosed are nucleotides, cells, and methods associated with the compositions including their use as vaccines, including vectors and methods for a heterologous prime/boost vaccination strategy.

### CROSS REFERENCE TO RELATED APPLICATIONS

[0001] This application is a Continuation of International Patent Application No PCT/US2022/076678, filed Sep. 19, 2022, which claims the benefit of U.S. Provisional Application No. 63/245,663 filed Sep. 17, 2021, U.S. Provisional Application No. 63/281,027 filed Nov. 18, 2021, and U.S. Provisional Application No. 63/320,685 filed Mar. 16, 2022, each of which is hereby incorporated in their entirety by reference for all purposes.

### SEQUENCE LISTING

[0002] The instant application contains a Sequence Listing which has been submitted electronically in .XML format and is hereby incorporated by reference in its entirety. Said .XML copy, created on Feb. 2, 2023, is named GSO-105WO and is 6,031,351 bytes in size.

### BACKGROUND

[0003] Therapeutic vaccines based on tumor-specific antigens hold great promise as a next-generation of personalized cancer immunotherapy.¹⁻³ For example, cancers with a high mutational burden, such as non-small cell lung cancer (NSCLC) and melanoma, are particularly attractive targets of such therapy given the relatively greater likelihood of neoantigen generation.^{4,5} Early evidence shows that neoantigen-based vaccination can elicit T-cell responses⁶ and that neoantigen targeted cell-therapy can cause tumor regression under certain circumstances in selected patients.⁷

[0004] One question for neoantigen vaccine design is which of the many coding mutations present in subject tumors can generate the “best” therapeutic neoantigens, e.g., antigens that can elicit anti-tumor immunity and cause tumor regression.

[0005] Initial methods have been proposed incorporating mutation-based analysis using next-generation sequencing, RNA gene expression, and prediction of MHC binding affinity of candidate neoantigen peptides⁸. However, these proposed methods can fail to model the entirety of the epitope generation process, which contains many steps (e.g., TAP transport, proteasomal cleavage, and/or TCR recognition) in addition to gene expression and MHC binding⁹. Consequently, existing methods are likely to suffer from reduced low positive predictive value (PPV).

[0006] Indeed, analyses of peptides presented by tumor cells performed by multiple groups have shown that <5% of peptides that are predicted to be presented using gene expression and MHC binding affinity can be found on the tumor surface MHC^{10,11}. This low correlation between binding prediction and MHC presentation was further reinforced by recent observations of the lack of predictive accuracy improvement of binding-restricted neoantigens for checkpoint inhibitor response over the number of mutations alone.¹²

[0007] This low positive predictive value (PPV) of existing methods for predicting presentation presents a problem for neoantigen-based vaccine design. If vaccines are designed using predictions with a low PPV, most patients are unlikely to receive a therapeutic neoantigen and fewer still are likely to receive more than one (even assuming all presented peptides are immunogenic). Thus, neoantigen vaccination with current methods is unlikely to succeed in a substantial number of subjects having tumors.

[0008] Additionally, previous approaches generated candidate neoantigens using only cis-acting mutations, and largely neglected to consider additional sources of neo-ORFs, including mutations in splicing factors, which occur in multiple tumor types and lead to aberrant splicing of many genes¹³, and mutations that create or remove protease cleavage sites.

[0009] Finally, standard approaches to tumor genome and transcriptome analysis can miss somatic mutations that give rise to candidate neoantigens due to suboptimal conditions in library construction, exome and transcriptome capture, sequencing, or data analysis. Likewise, standard tumor analysis approaches can inadvertently promote sequence artifacts or germline polymorphisms as neoantigens, leading to inefficient use of vaccine capacity or auto-immunity risk, respectively.

[0010] In addition to the challenges of current neoantigen prediction methods certain challenges also exist with the available vector systems that can be used for neoantigen delivery in humans, many of which are derived from humans. For example, many humans have pre-existing immunity to human viruses as a result of previous natural exposure, and this immunity can be a major obstacle to the use of recombinant human viruses for neoantigen delivery for cancer treatment.

[0011] In addition, targeting antigens that are shared among patients with cancer hold great promise as a vaccine strategy, including targeting both neoantigens with a mutation as well as tumor antigens without a mutation (e.g., tumors antigens that are improperly expressed). The challenges with shared antigen vaccine strategies include at least those discussed above.

### SUMMARY

[0012] A method for stimulating an immune response in a subject, the method comprising administering to the subject a composition for delivery of a self-replicating alphavirus-based expression system and administering to the subject a composition for delivery of a chimpanzee adenovirus (ChAdV)-based expression system, and wherein the composition for delivery of the ChAdV-based expression system is administered as a priming dose and the composition for delivery of the self-replicating alphavirus-based expression system is administered as one or more boosting doses, wherein the expression systems encode at least one antigen-encoding nucleic acid sequence, and wherein the self-replicating alphavirus-based expression system and the chimpanzee adenovirus (ChAdV)-based expression system are administered as a maintenance therapy.

[0013] In some aspects, the maintenance therapy comprises a combination therapy with chemotherapy, immune checkpoint inhibitor therapy, radiation therapy, or combinations thereof, optionally wherein the chemotherapy comprises fluoropyrimidine and/or bevacizumab.

[0014] Also provided for herein is a method for stimulating an immune response in a subject, the method comprising administering to the subject a composition for delivery of a self-replicating alphavirus-based expression system and administering to the subject a composition for delivery of a chimpanzee adenovirus (ChAdV)-based expression system, and wherein the composition for delivery of the ChAdV-based expression system is administered as a priming dose and the composition for delivery of the self-replicating alphavirus-based expression system is administered as one or more boosting doses, wherein the expression systems encode at least one antigen-encoding nucleic acid sequence, and wherein the self-replicating alphavirus-based expression system and the chimpanzee adenovirus (ChAdV)-based expression system are administered as an adjuvant therapy.

[0015] In some aspects, the adjuvant therapy comprises a combination therapy with chemotherapy, immune checkpoint inhibitor therapy, radiation therapy, or combinations thereof, optionally wherein the chemotherapy comprises fluoropyrimidine and/or bevacizumab.

[0016] Also provided for herein is a method for stimulating an immune response in a subject, the method comprising administering to the subject either (1) a composition for delivery of a self-replicating alphavirus-based expression system or (2) a composition for delivery of a chimpanzee adenovirus (ChAdV)-based expression system, and wherein the self-replicating alphavirus-based expression system or the chimpanzee adenovirus (ChAdV)-based expression system is administered as an adjuvant therapy, wherein the expression systems encode at least one antigen-encoding nucleic acid sequence, wherein the adjuvant therapy comprises a combination therapy with chemotherapy, immune checkpoint inhibitor therapy, radiation therapy, or combinations thereof, optionally wherein the chemotherapy comprises fluoropyrimidine and/or bevacizumab.

[0017] In some aspects, one or more boosting doses of the composition for delivery of the self-replicating alphavirus-based expression system is administered.

[0018] In some aspects, the combination therapy comprises fluoropyrimidine and/or bevacizumab. In some aspects, the combination therapy comprises fluoropyrimidine and bevacizumab. In some aspects, the combination therapy comprises fluoropyrimidine, bevacizumab, and an immune checkpoint inhibitor therapy. In some aspects, the immune checkpoint inhibitor comprises (1) an anti-PD-1 antibody or an antigen-binding fragment thereof, (2) an anti-PD-L1 antibody or an antigen-binding fragment thereof, and/or (3) an anti-CTLA-4 antibody or an antigen-binding fragment thereof. In some aspects, the immune checkpoint inhibitor therapy comprises administration of an anti-CTLA-4 antibody or an antigen-binding fragment thereof only with the priming dose and the first boosting dose. In some aspects, the anti-CTLA-4 antibody comprises ipilimumab. In some aspects, the ipilimumab is administered at a dose of 30 mg subcutaneously. In some aspects, the immune checkpoint inhibitor therapy comprises administration of an anti-PD-L1 antibody or an antigen-binding fragment thereof every 4 weeks (Q4W). In some aspects, the anti-PD-L1 antibody comprises atezolizumab or nivolumab. In some aspects, the atezolizumab is administered at a dose of 1680 mg intravenously. In some aspects, the nivolumab is administered at a dose of 480 mg intravenously.

[0019] In some aspects, the immune checkpoint inhibitor therapy comprises at least 2, 3, 4, 5, 6, 7, 8, 9, 10, 11, 12, or 13 administrations. In some aspects, the administration of the anti-PD-L1 antibody or an antigen-binding fragment thereof comprises at least 2, 3, 4, 5, 6, 7, 8, 9, 10, 11, 12, or 13 administrations. In some aspects, the immune checkpoint inhibitor therapy comprises at least 13 administrations. In some aspects, the administration of the anti-PD-L1 antibody or an antigen-binding fragment thereof comprises at least 13 administrations.

[0020] In some aspects, the subject as previously undergone surgery to remove a tumor and/or cancerous tissue, chemotherapy, immunotherapy (e.g., immune checkpoint inhibitor therapy), radiation therapy, or combinations thereof. In some aspects, the prior chemotherapy comprises oxaliplatin, fluoropyrimidine, and/or bevacizumab. In some aspects, the prior chemotherapy comprises oxaliplatin, fluoropyrimidine, and bevacizumab. In some aspects, the prior chemotherapy was administered for up to 24 weeks prior to administration of the maintenance therapy.

[0021] The method of any one of the above claims, wherein the subject has colorectal cancer (CRC). In some aspects, the CRC is classified as Stage IV, microsatellite-stable, and BRAF^{wt}. In some aspects, the CRC is classified as Stage II or III.

[0022] In some aspects, the subject is classified as ctDNA positive.

[0023] In some aspects, two or more boosting doses are administered. In some aspects, 1, 2, 3, 4, 5, 6, 7, or 8 boosting doses are administered. In some aspects, the ChAdV-based expression system is further administered as a boosting dose. In some aspects, the ChAdV-based boosting dose is only administered as a single boosting dose.

[0024] In some aspects, the ChAdV-based expression system is administered as the boosting dose on or about day 140 after the priming dose of the ChAdV-based expression system. In some aspects, the ChAdV-based expression system is administered as the boosting dose on or about week 20 after the priming dose of the ChAdV-based expression system. In some aspects, the ChAdV-based expression system is administered as the boosting dose on or about month 5 after the priming dose of the ChAdV-based expression system. In some aspects, the ChAdV-based expression system is administered as the boosting dose on or after day 140 after the priming dose of the ChAdV-based expression system. In some aspects, the ChAdV-based expression system is administered as the boosting dose on or after week 20 after the priming dose of the ChAdV-based expression system. In some aspects, the ChAdV-based expression system is administered as the boosting dose on or after month 5 after the priming dose of the ChAdV-based expression system.

[0025] In some aspects, the composition for delivery of the ChAdV-based expression system is administered intramuscularly (IM), intradermally (ID), subcutaneously (SC), or intravenously (IV). In some aspects, the composition for delivery of the ChAdV-based expression system is administered (IM). In some aspects, the IM administration is administered at separate injection sites. In some aspects, the separate injection sites are in opposing deltoid muscles. In some aspects, the separate injection sites are in gluteus or rectus femoris sites on each side.

[0026] In some aspects, the composition for delivery of the self-replicating alphavirus-based expression system is administered intramuscularly (IM), intradermally (ID), subcutaneously (SC), or intravenously (IV). In some aspects, the composition for delivery of the self-replicating alphavirus-based expression system is administered (IM).

[0027] In some aspects, the self-replicating alphavirus-based expression system is administered as at least two boosting doses. In some aspects, the self-replicating alphavirus-based expression system is administered as at least two or more boosting doses at least 28 days apart. In some aspects, the self-replicating alphavirus-based expression system is administered as at least two or more boosting doses at least 4 weeks (Q4W) apart. In some aspects, the self-replicating alphavirus-based expression system is administered as at least two or more boosting doses at least one month apart. In some aspects, the self-replicating alphavirus-based expression system is administered as at least two or more boosting doses at least 56 days apart. In some aspects, the self-replicating alphavirus-based expression system is administered as at least two or more boosting doses at least 8 weeks (Q8W) apart. In some aspects, the self-replicating alphavirus-based expression system is administered as at least two or more boosting doses at least 2 months apart.

[0028] In some aspects, the self-replicating alphavirus-based expression system is administered as at least two boosting doses on or about days 28 and 84 after the priming dose of the ChAdV-based expression system. In some aspects, the self-replicating alphavirus-based expression system is administered as at least two boosting doses on or about weeks 4 and 12 after the priming dose of the ChAdV-based expression system. In some aspects, the self-replicating alphavirus-based expression system is administered as at least two boosting doses on or about months 1 and 3 after the priming dose of the ChAdV-based expression system.

[0029] In some aspects, the self-replicating alphavirus-based expression system is administered as at least four boosting doses. In some aspects, the self-replicating alphavirus-based expression system is administered on or about days 28, 84, 224, and 308 relative to the priming dose of the ChAdV-based expression system. In some aspects, the self-replicating alphavirus-based expression system is administered on or about weeks 4, 12, 32, and 44 relative to the priming dose of the ChAdV-based expression system. In some aspects, the self-replicating alphavirus-based expression system is administered on or about months 1, 3, 8, and 11 relative to the priming dose of the ChAdV-based expression system.

[0030] In some aspects, the method further comprises determining or having determined the HLA-haplotype of the subject.

[0031] In some aspects, the stimulating the immune response comprises stimulating a molecular response. In some aspects, the molecular response comprises a reduction in ctDNA.

[0032] In some aspects, the reduction in ctDNA is at least a 20%, at least a 30%, at least a 40%, or at least a 50% reduction in ctDNA. In some aspects, the reduction in ctDNA is at least a 30% reduction in ctDNA. In some aspects, the reduction in ctDNA is at least a 50% reduction in ctDNA.

[0033] In some aspects, the at least one antigen-encoding nucleic acid sequence comprises subject-specific neoantigen-encoding nucleic acid sequences. In some aspects, the at least one antigen-encoding nucleic acid sequence comprises 20 subject-specific neoantigen-encoding nucleic acid sequences.

[0034] In some aspects, the composition for delivery of the self-replicating alphavirus-based expression system comprises: (A) the self-replicating alphavirus-based expression system, wherein the self-replicating alphavirus-based expression system comprises one or more vectors, wherein the one or more vectors comprises: (a) an RNA alphavirus backbone, wherein the RNA alphavirus backbone comprises: (i) at least one promoter nucleotide sequence, and (ii) at least one polyadenylation (poly(A)) sequence; and (b) a cassette, wherein the cassette comprises: (i) at least one antigen-encoding nucleic acid sequence comprising: a. an epitope-encoding nucleic acid sequence, optionally comprising at least one alteration that makes the encoded epitope sequence distinct from the corresponding peptide sequence encoded by a wild-type nucleic acid sequence, b. optionally a 5′ linker sequence, and c. optionally a 3′ linker sequence; (ii) optionally, a second promoter nucleotide sequence operably linked to the at least one antigen-encoding nucleic acid sequence; and (iii) optionally, at least one second poly(A) sequence, wherein the second poly(A) sequence is a native poly(A) sequence or an exogenous poly(A) sequence to the alphavirus, and (B) a lipid-nanoparticle (LNP), wherein the LNP encapsulates the self-replicating alphavirus-based expression system.

[0035] In some aspects, the composition for delivery of the self-replicating alphavirus-based expression system comprises, (A) the self-replicating alphavirus-based expression system, wherein the self-replicating alphavirus-based expression system comprises one or more vectors, wherein the one or more vectors comprises: (a) an RNA alphavirus backbone, wherein the RNA alphavirus backbone comprises the nucleic acid sequence set forth in SEQ ID NO:6, wherein the RNA alphavirus backbone sequence comprises a 26S promoter nucleotide sequence and a poly(A) sequence, wherein the 26S promoter sequence is endogenous to the RNA alphavirus backbone, and wherein the poly(A) sequence is endogenous to the RNA alphavirus backbone; and (b) a cassette integrated between the 26S promoter nucleotide sequence and the poly(A) sequence, wherein the cassette is operably linked to the 26S promoter nucleotide sequence, and wherein the cassette comprises at least one antigen-encoding nucleic acid sequence comprising: a. an epitope-encoding nucleic acid sequence, optionally comprising at least one alteration that makes the encoded epitope sequence distinct from the corresponding peptide sequence encoded by a wild-type nucleic acid sequence, b. optionally a 5′ linker sequence, and c. optionally a 3′ linker sequence; and (B) a lipid-nanoparticle (LNP), wherein the LNP encapsulates the self-replicating alphavirus-based expression system.

[0036] In some aspects, an ordered sequence of each element of the cassette in the composition for delivery of the self-replicating alphavirus-based expression system is described in the formula, from 5′ to 3′, comprising Pₐ-(L5_{b}-N_{c}-L3_{d})_{X}-(G5ₑ-U_{f})_{Y}-G3_{g} wherein P comprises the second promoter nucleotide sequence, where a=0 or 1, N comprises one of the epitope-encoding nucleic acid sequences, wherein the epitope-encoding nucleic acid sequence comprises an MHC class I epitope-encoding nucleic acid sequence, where c=1, L5 comprises the 5′ linker sequence, where b=0 or 1, L3 comprises the 3′ linker sequence, where d=0 or 1, G5 comprises one of the at least one nucleic acid sequences encoding a GPGPG (SEQ ID NO: 29524) amino acid linker, where e=0 or 1, G3 comprises one of the at least one nucleic acid sequences encoding a GPGPG (SEQ ID NO:29524) amino acid linker, where g=0 or 1, U comprises one of the at least one MHC class II epitope-encoding nucleic acid sequence, where f=1, X=1 to 400, where for each X the corresponding N_{c} is an MHC class I epitope-encoding nucleic acid sequence, and Y=0, 1, or 2, where for each Y the corresponding U_{f} is an MHC class II epitope-encoding nucleic acid sequence. In some aspects, for each X the corresponding N_{c} is a distinct MHC class I epitope-encoding nucleic acid sequence. In some aspects, for each Y the corresponding U_{f} is a distinct MHC class II epitope-encoding nucleic acid sequence. In some aspects, a=0, b=1, d=1, e=1, g=1, h=1, X=20, Y=2, the at least one promoter nucleotide sequence is a single 26S promoter nucleotide sequence provided by the RNA alphavirus backbone, the at least one polyadenylation poly(A) sequence is a poly(A) sequence of at least 100 consecutive A nucleotides (SEQ ID NO: 29527) provided by the RNA alphavirus backbone, the cassette is integrated between the 26S promoter nucleotide sequence and the poly(A) sequence, wherein the cassette is operably linked to the 26S promoter nucleotide sequence and the poly(A) sequence, each N encodes a MHC class I epitope 7-15 amino acids in length, L5 is a native 5′ linker sequence that encodes a native N-terminal amino acid sequence of the MHC I epitope, and wherein the 5′ linker sequence encodes a peptide that is at least 3 amino acids in length, L3 is a native 3′ linker sequence that encodes a native C-terminal amino acid sequence of the MHC I epitope, and wherein the 3′ linker sequence encodes a peptide that is at least 3 amino acids in length, U is each of a PADRE class II sequence and a Tetanus toxoid MHC class II sequence, the RNA alphavirus backbone is the sequence set forth in SEQ ID NO:6, and each of the MHC class I epitope-encoding nucleic acid sequences encodes a polypeptide that is between 13 and 25 amino acids in length.

[0037] In some aspects, the LNP comprises a lipid selected from the group consisting of: an ionizable amino lipid, a phosphatidylcholine, cholesterol, a PEG-based coat lipid, or a combination thereof. In some aspects, the LNP comprises an ionizable amino lipid, a phosphatidylcholine, cholesterol, and a PEG-based coat lipid. In some aspects, the ionizable amino lipids comprise MC3-like (dilinoleylmethyl-4-dimethylaminobutyrate) molecules. In some aspects, the LNP-encapsulated expression system has a diameter of about 100 nm.

[0038] In some aspects, the cassette is integrated between the at least one promoter nucleotide sequence and the at least one poly(A) sequence.

[0039] In some aspects, the at least one promoter nucleotide sequence is operably linked to the cassette.

[0040] In some aspects, the one or more vectors comprise one or more +-stranded RNA vectors. In some aspects, the one or more +-stranded RNA vectors comprise a 5′ 7-methylguanosine (m7g) cap. In some aspects, the one or more +-stranded RNA vectors are produced by in vitro transcription. In some aspects, the one or more vectors are self-replicating within a mammalian cell. In some aspects, the RNA alphavirus backbone comprises at least one nucleotide sequence of an Aura virus, a Fort Morgan virus, a Venezuelan equine encephalitis virus, a Ross River virus, a Semliki Forest virus, a Sindbis virus, or a Mayaro virus. In some aspects, the RNA alphavirus backbone comprises at least one nucleotide sequence of a Venezuelan equine encephalitis virus. In some aspects, the RNA alphavirus backbone comprises at least sequences for nonstructural protein-mediated amplification, a 26S promoter sequence, a poly(A) sequence, a nonstructural protein 1 (nsP1) gene, a nsP2 gene, a nsP3 gene, and a nsP4 gene encoded by the nucleotide sequence of the Aura virus, the Fort Morgan virus, the Venezuelan equine encephalitis virus, the Ross River virus, the Semliki Forest virus, the Sindbis virus, or the Mayaro virus. In some aspects, the RNA alphavirus backbone comprises at least sequences for nonstructural protein-mediated amplification, a 26S promoter sequence, and a poly(A) sequence encoded by the nucleotide sequence of the Aura virus, the Fort Morgan virus, the Venezuelan equine encephalitis virus, the Ross River virus, the Semliki Forest virus, the Sindbis virus, or the Mayaro virus. In some aspects, sequences for nonstructural protein-mediated amplification are selected from the group consisting of: an alphavirus 5′ UTR, a 51-nt CSE, a 24-nt CSE, a 26S subgenomic promoter sequence, a 19-nt CSE, an alphavirus 3′ UTR, or combinations thereof. In some aspects, the RNA alphavirus backbone does not encode structural virion proteins capsid, E2 and E1. In some aspects, the cassette is inserted in place of structural virion proteins within the nucleotide sequence of the Aura virus, the Fort Morgan virus, the Venezuelan equine encephalitis virus, the Ross River virus, the Semliki Forest virus, the Sindbis virus, or the Mayaro virus. In some aspects, the Venezuelan equine encephalitis virus comprises the sequence of SEQ ID NO:3 or SEQ ID NO:5. In some aspects, the Venezuelan equine encephalitis virus comprises the sequence of SEQ ID NO:3 or SEQ ID NO:5 further comprising a deletion between base pair 7544 and 11175, In some aspects, the RNA alphavirus backbone comprises the sequence set forth in SEQ ID NO:6 or SEQ ID NO:7. In some aspects, the cassette is inserted at position 7544 to replace the deletion between base pairs 7544 and 11175 as set forth in the sequence of SEQ ID NO:3 or SEQ ID NO:5. In some aspects, the insertion of the cassette provides for transcription of a polycistronic RNA comprising the nsP1-4 genes and the at least one nucleic acid sequence, wherein the nsP1-4 genes and the at least one nucleic acid sequence are in separate open reading frames.

[0041] In some aspects, the at least one promoter nucleotide sequence is the native 26S promoter nucleotide sequence encoded by the RNA alphavirus backbone. In some aspects, the at least one promoter nucleotide sequence is an exogenous RNA promoter. In some aspects, the second promoter nucleotide sequence is a 26S promoter nucleotide sequence. In some aspects, the second promoter nucleotide sequence comprises multiple 26S promoter nucleotide sequences, wherein each 26S promoter nucleotide sequence provides for transcription of one or more of the separate open reading frames.

[0042] In some aspects, the one or more vectors are each at least 300 nt in size. In some aspects, the one or more vectors are each at least 1 kb in size. In some aspects, the one or more vectors are each 2 kb in size. In some aspects, the one or more vectors are each less than 5 kb in size.

[0043] In some aspects, the at least one antigen-encoding nucleic acid sequence comprises two or more antigen-encoding nucleic acid sequences. In some aspects, each antigen-encoding nucleic acid sequence is linked directly to one another. In some aspects, each antigen-encoding nucleic acid sequence is linked to a distinct antigen-encoding nucleic acid sequence with a nucleic acid sequence encoding a linker. In some aspects, the linker links two MHC class I epitope-encoding nucleic acid sequences or an MHC class I epitope-encoding nucleic acid sequence to an MHC class II epitope-encoding nucleic acid sequence. In some aspects, the linker is selected from the group consisting of: (1) consecutive glycine residues, at least 2, 3, 4, 5, 6, 7, 8, 9, or 10 residues in length (SEQ ID NO: 29525); (2) consecutive alanine residues, at least 2, 3, 4, 5, 6, 7, 8, 9, or 10 residues in length (SEQ ID NO:29526); (3) two arginine residues (RR); (4) alanine, alanine, tyrosine (AAY); (5) a consensus sequence at least 2, 3, 4, 5, 6, 7, 8, 9, or 10 amino acid residues in length that is processed efficiently by a mammalian proteasome; and (6) one or more native sequences flanking the antigen derived from the cognate protein of origin and that is at least 2, 3, 4, 6, 7, 8, 9, 10, 11, 12, 13, 14, 15, 16, 17, 18, 19, 20, or 2-20 amino acid residues in length. In some aspects, the linker links two MHC class II epitope-encoding nucleic acid sequences or an MHC class II sequence to an MHC class I epitope-encoding nucleic acid sequence. In some aspects, the linker comprises the sequence GPGPG (SEQ ID NO:29524).

[0044] In some aspects, the antigen-encoding nucleic acid sequences is linked, operably or directly, to a separate or contiguous sequence that enhances the expression, stability, cell trafficking, processing and presentation, and/or immunogenicity of the antigen-encoding nucleic acid sequence. In some aspects, the separate or contiguous sequence comprises at least one of: a ubiquitin sequence, a ubiquitin sequence modified to increase proteasome targeting (e.g., the ubiquitin sequence contains a Gly to Ala substitution at position 76), an immunoglobulin signal sequence (e.g., IgK), a major histocompatibility class I sequence, lysosomal-associated membrane protein (LAMP)-1, human dendritic cell lysosomal-associated membrane protein, and a major histocompatibility class II sequence; optionally wherein the ubiquitin sequence modified to increase proteasome targeting is A76.

[0045] In some aspects, the at least one antigen-encoding nucleic acid sequence comprises at least 2-10, 2, 3, 4, 5, 6, 7, 8, 9, or 10 antigen-encoding nucleic acid sequences, optionally wherein each antigen-encoding nucleic acid sequence encodes a distinct antigen-encoding nucleic acid sequence. In some aspects, the at least one antigen-encoding nucleic acid sequence comprises at least 11-20, 15-20, 11-100, 11-200, 11-300, 11-400, 11, 12, 13, 14, 15, 16, 17, 18, 19, 20 or up to 400 antigen-encoding nucleic acid sequences, optionally wherein each antigen-encoding nucleic acid sequence encodes a distinct antigen-encoding nucleic acid sequence. In some aspects, the at least one antigen-encoding nucleic acid sequence comprises at least 11-20, 15-20, 11-100, 11-200, 11-300, 11-400, 11, 12, 13, 14, 15, 16, 17, 18, 19, 20 or up to 400 antigen-encoding nucleic acid sequences. In some aspects, the at least one antigen-encoding nucleic acid sequence comprises at least 2-400 antigen-encoding nucleic acid sequences and wherein at least two of the antigen-encoding nucleic acid sequences encode epitope sequences or portions thereof that are presented by MHC class I on a cell surface. In some aspects, at least two of the MHC class I epitopes are presented by MHC class I on the tumor cell surface.

[0046] In some aspects, the epitope-encoding nucleic acid sequences comprises at least one MHC class I epitope-encoding nucleic acid sequence, and wherein each antigen-encoding nucleic acid sequence encodes a polypeptide sequence between 8 and 35 amino acids in length, optionally 9-17, 9-25, 8, 9, 10, 11, 12, 13, 14, 15, 16, 17, 18, 19, 20, 21, 22, 23, 24, 25, 26, 27, 28, 29, 30, 31, 32, 33, 34 or 35 amino acids in length.

[0047] In some aspects, the at least one MHC class II epitope-encoding nucleic acid sequence is present. In some aspects, the at least one MHC class II epitope-encoding nucleic acid sequence is present and comprises at least one MHC class II epitope-encoding nucleic acid sequence that comprises at least one alteration that makes the encoded epitope sequence distinct from the corresponding peptide sequence encoded by a wild-type nucleic acid sequence. In some aspects, the epitope-encoding nucleic acid sequence comprises an MHC class II epitope-encoding nucleic acid sequence and wherein each antigen-encoding nucleic acid sequence encodes a polypeptide sequence that is 12-20, 12, 13, 14, 15, 16, 17, 18, 19, 20, or 20-40 amino acids in length. In some aspects, the epitope-encoding nucleic acid sequences comprises an MHC class II epitope-encoding nucleic acid sequence, wherein the at least one MHC class II epitope-encoding nucleic acid sequence is present, and wherein the at least one MHC class II epitope-encoding nucleic acid sequence comprises at least one universal MHC class II epitope-encoding nucleic acid sequence, optionally wherein the at least one universal sequence comprises at least one of Tetanus toxoid and PADRE.

[0048] In some aspects, the at least one promoter nucleotide sequence or the second promoter nucleotide sequence is inducible. In some aspects, the at least one promoter nucleotide sequence or the second promoter nucleotide sequence is non-inducible. In some aspects, the at least one poly(A) sequence comprises a poly(A) sequence native to the alphavirus. In some aspects, the at least In some aspects, the at least one poly(A) sequence is operably linked to at least one of the at least one nucleic acid sequences. In some aspects, the at least one poly(A) sequence is at least 20, at least 30, at least 40, at least 50, at least 60, at least 70, at least 80, or at least 90 consecutive A nucleotides. In some aspects, the at least one poly(A) sequence is at least 100 consecutive A nucleotides (SEQ ID NO: 29527).

[0049] In some aspects, the epitope-encoding nucleic acid sequence comprises a MHC class I epitope-encoding nucleic acid sequence, and wherein the MHC class I epitope-encoding nucleic acid sequence is selected by performing the steps of: (a) obtaining at least one of exome, transcriptome, or whole genome tumor nucleotide sequencing data from the tumor, wherein the tumor nucleotide sequencing data is used to obtain data representing peptide sequences of each of a set of epitopes; (b) inputting the peptide sequence of each epitope into a presentation model to generate a set of numerical likelihoods that each of the epitopes is presented by one or more of the MHC alleles on the tumor cell surface of the tumor, the set of numerical likelihoods having been identified at least based on received mass spectrometry data; and (c) selecting a subset of the set of epitopes based on the set of numerical likelihoods to generate a set of selected epitopes which are used to generate the MHC class I epitope-encoding nucleic acid sequence. In some aspects, each of the MHC class I epitope-encoding nucleic acid sequences is selected by performing the steps of: (a) obtaining at least one of exome, transcriptome, or whole genome tumor nucleotide sequencing data from the tumor, wherein the tumor nucleotide sequencing data is used to obtain data representing peptide sequences of each of a set of epitopes; (b) inputting the peptide sequence of each epitope into a presentation model to generate a set of numerical likelihoods that each of the epitopes is presented by one or more of the MHC alleles on the tumor cell surface of the tumor, the set of numerical likelihoods having been identified at least based on received mass spectrometry data; and (c) selecting a subset of the set of epitopes based on the set of numerical likelihoods to generate a set of selected epitopes which are used to generate the at least 20 MHC class I epitope-encoding nucleic acid sequences. In some aspects, a number of the set of selected epitopes is 2-20. In some aspects, the presentation model represents dependence between: (a) presence of a pair of a particular one of the MHC alleles and a particular amino acid at a particular position of a peptide sequence; and (b) likelihood of presentation on the tumor cell surface, by the particular one of the MHC alleles of the pair, of such a peptide sequence comprising the particular amino acid at the particular position. In some aspects, selecting the set of selected epitopes comprises selecting epitopes that have an increased likelihood of being presented on the tumor cell surface relative to unselected epitopes based on the presentation model. In some aspects, selecting the set of selected epitopes comprises selecting epitopes that have an increased likelihood of being capable of inducing a tumor-specific immune response in the subject relative to unselected epitopes based on the presentation model. In some aspects, selecting the set of selected epitopes comprises selecting epitopes that have an increased likelihood of being capable of being presented to naïve T cells by professional antigen presenting cells (APCs) relative to unselected epitopes based on the presentation model, optionally wherein the APC is a dendritic cell (DC). In some aspects, selecting the set of selected epitopes comprises selecting epitopes that have a decreased likelihood of being subject to inhibition via central or peripheral tolerance relative to unselected epitopes based on the presentation model. In some aspects, selecting the set of selected epitopes comprises selecting epitopes that have a decreased likelihood of being capable of inducing an autoimmune response to normal tissue in the subject relative to unselected epitopes based on the presentation model. In some aspects, exome or transcriptome nucleotide sequencing data is obtained by performing sequencing on the tumor tissue. In some aspects, the sequencing is next generation sequencing (NGS) or any massively parallel sequencing approach.

[0050] In some aspects, the ChAdV vector comprises: (a) an ChAdV backbone, wherein the ChAdV backbone comprises: (i) at least one promoter nucleotide sequence, and (ii) at least one polyadenylation (poly(A)) sequence; and (b) a cassette, wherein the cassette comprises: (i) at least one antigen-encoding nucleic acid sequence comprising: a. an epitope-encoding nucleic acid sequence, optionally comprising at least one alteration that makes the encoded epitope sequence distinct from the corresponding peptide sequence encoded by a wild-type nucleic acid sequence, b. optionally a 5′ linker sequence, and c. optionally a 3′ linker sequence; and wherein the cassette is operably linked to the at least one promoter nucleotide sequence and the at least one poly(A) sequence.

[0051] In some aspects, the ChAdV vector comprises: (a) an ChAdV backbone, wherein the ChAdV backbone comprises: (i) a modified ChAdV68 sequence comprising at least nucleotides 2 to 36,518 of the sequence set forth in SEQ ID NO:1, wherein the nucleotides 2 to 36,518 lack: (1) nucleotides 577 to 3403 of the sequence shown in SEQ ID NO:1 corresponding to an E1 deletion; (2) nucleotides 27,125 to 31,825 of the sequence shown in SEQ ID NO:1 corresponding to an E3 deletion; and optionally (3) nucleotides 34,916 to 35,642 of the sequence shown in SEQ ID NO:1 corresponding to a partial E4 deletion; (ii) a CMV promoter nucleotide sequence; and (iii) an SV40 polyadenylation (poly(A)) sequence; and (b) a cassette, wherein the cassette comprises: (i) at least one antigen-encoding nucleic acid sequence comprising: a. an epitope-encoding nucleic acid sequence, optionally comprising at least one alteration that makes the encoded epitope sequence distinct from the corresponding peptide sequence encoded by a wild-type nucleic acid sequence, b. optionally a 5′ linker sequence, and c. optionally a 3′ linker sequence; and wherein the cassette is inserted within the E1 deletion and the cassette is operably linked to the CMV promoter nucleotide sequence and the SV40 poly(A) sequence.

[0052] In some aspects, the epitope-encoding nucleic acid sequence encodes an epitope known or suspected to be presented by MHC class I on a surface of a cell, optionally wherein the surface of the cell is a tumor cell surface or an infected cell surface, and optionally wherein the cell is the subject's cell. In some aspects, the cell is a tumor cell selected from the group consisting of: lung cancer, melanoma, breast cancer, ovarian cancer, prostate cancer, kidney cancer, gastric cancer, colon cancer, testicular cancer, head and neck cancer, pancreatic cancer, brain cancer, B-cell lymphoma, acute myelogenous leukemia, chronic myelogenous leukemia, chronic lymphocytic leukemia, T cell lymphocytic leukemia, non-small cell lung cancer, and small cell lung cancer, or wherein the cell is an infected cell selected from the group consisting of: a pathogen infected cell, a virally infected cell, a bacterially infected cell, an fungally infected cell, and a parasitically infected cell. In some aspects, the virally infected cell is an HIV infected cell.

[0053] In some aspects, an ordered sequence of each element of the cassette in the composition for delivery of the ChAdV-based expression system is described in the formula, from 5′ to 3′, comprising Pₐ-(L5_{b}-N_{c}-L3_{d})_{X}-(G5ₑ-U_{f})_{Y}-G3_{g} wherein P comprises the at least one promoter sequence operably linked to at least one of the at least one antigen-encoding nucleic acid sequences, where a=1, N comprises one of the epitope-encoding nucleic acid sequences, wherein the epitope-encoding nucleic acid sequence comprises an MHC class I epitope-encoding nucleic acid sequence, where c=1, L5 comprises the 5′ linker sequence, where b=0 or 1, L3 comprises the 3′ linker sequence, where d=0 or 1, G5 comprises one of the at least one nucleic acid sequences encoding a GPGPG (SEQ ID NO:29524) amino acid linker, where e=0 or 1, G3 comprises one of the at least one nucleic acid sequences encoding a GPGPG (SEQ ID NO:29524) amino acid linker, where g=0 or 1, U comprises one of the at least one MHC class II epitope-encoding nucleic acid sequence, where f=1, X=1 to 400, where for each X the corresponding N_{c} is an MHC class I epitope-encoding nucleic acid sequence, and Y=0, 1, or 2, where for each Y the corresponding U_{f} is an MHC class II epitope-encoding nucleic acid sequence. In some aspects, for each X the corresponding N_{c} is a distinct MHC class I epitope-encoding nucleic acid sequence. In some aspects, for each Y the corresponding U_{f} is a distinct MHC class II epitope-encoding nucleic acid sequence. In some aspects, b=1, d=1, e=1, g=1, h=1, X=10, Y=2, P is a CMV promoter sequence, each N encodes a MHC class I epitope 7-15 amino acids in length, L5 is a native 5′ linker sequence that encodes a native N-terminal amino acid sequence of the MHC I epitope, and wherein the 5′ linker sequence encodes a peptide that is at least 3 amino acids in length, L3 is a native 3′ linker sequence that encodes a native C-terminal amino acid sequence of the MHC I epitope, and wherein the 3′ linker sequence encodes a peptide that is at least 3 amino acids in length, U is each of a PADRE class II sequence and a Tetanus toxoid MHC class II sequence, the ChAdV vector comprises a modified ChAdV68 sequence comprising the sequence of SEQ ID NO:1 with an E1 (nt 577 to 3403) deletion and an E3 (nt 27,125-31,825) deletion and the neoantigen cassette is inserted within the E1 deletion, and each of the MHC class I antigen-encoding nucleic acid sequences encodes a polypeptide that is 25 amino acids in length.

[0054] In some aspects, the ChAdV-based expression system comprises a ChAdV68 vector backbone, wherein the ChAdV68 vector backbone comprises at least nucleotides 2 to 36,518 of the sequence set forth in SEQ ID NO:1, except for lacking: (1) nucleotides 577 to 3403 of the sequence shown in SEQ ID NO:1 corresponding to an E1 deletion, (2) nucleotides 27,125 to 31,825 of the sequence shown in SEQ ID NO:1 corresponding to an E3 deletion, and optionally (3) nucleotides 34,916 to 35,642 corresponding to a partially deleted E4 gene of ChAdV68.

[0055] In some aspects, the cassette is integrated between the at least one promoter nucleotide sequence and the at least one poly(A) sequence. In some aspects, the at least one promoter nucleotide sequence is operably linked to the cassette.

[0056] In some aspects, the ChAdV backbone comprises a ChAdV68 vector backbone. In some aspects, the ChAdV68 vector backbone comprises the sequence set forth in SEQ ID NO:1. In some aspects, the ChAdV68 vector backbone comprises a functional deletion in at least one gene selected from the group consisting of an adenovirus E1A, E1B, E2A, E2B, E3, L1, L2, L3, L4, and L5 gene with reference to a ChAdV68 genome or with reference to the sequence shown in SEQ ID NO:1, optionally wherein the adenoviral backbone or modified ChAdV68 sequence is fully deleted or functionally deleted in: (1) E1A and E1B; or (2) E1A, E1B, and E3 with reference to the adenovirus genome or with reference to the sequence shown in SEQ ID NO:1, optionally wherein the E1 gene is functionally deleted through an E1 deletion of at least nucleotides 577 to 3403 with reference to the sequence shown in SEQ ID NO:1 and optionally wherein the E3 gene is functionally deleted through an E3 deletion of at least nucleotides 27,125 to 31,825 with reference to the sequence shown in SEQ ID NO:1. In some aspects, the ChAdV68 vector backbone comprises one or more genes or regulatory sequences with reference to a ChAdV68 genome or with reference to the sequence shown in SEQ ID NO:1, optionally wherein the one or more genes or regulatory sequences are selected from the group consisting of the chimpanzee adenovirus inverted terminal repeat (ITR), E1A, E1B, E2A, E2B, E3, E4, L1, L2, L3, L4, and L5 genes.

[0057] In some aspects, the ChAdV68 vector backbone comprises a partially deleted E4 gene. In some aspects, the partially deleted E4 gene comprises: A. the E4 gene sequence shown in SEQ ID NO:1 and that lacks at least nucleotides 34,916 to 35,642 of the sequence shown in SEQ ID NO:1, B. the E4 gene sequence shown in SEQ ID NO:1 and that lacks at least nucleotides 34,916 to 34,942, nucleotides 34,952 to 35,305 of the sequence shown in SEQ ID NO:1, nucleotides 35,302 to 35,642 of the sequence shown in SEQ ID NO:1, and wherein the vector comprises at least nucleotides 2 to 36,518 of the sequence shown in SEQ ID NO:1, C. the E4 gene sequence shown in SEQ ID NO:1 and that lacks at least nucleotides 34,980 to 36,516 of the sequence shown in SEQ ID NO:1, and wherein the vector comprises at least nucleotides 2 to 36,518 of the sequence shown in SEQ ID NO:1, D. the E4 gene sequence shown in SEQ ID NO:1 and that lacks at least nucleotides 34,979 to 35,642 of the sequence shown in SEQ ID NO:1, and wherein the vector comprises at least nucleotides 2 to 36,518 of the sequence shown in SEQ ID NO:1, E. an E4 deletion of at least a partial deletion of E4Orf2, a fully deleted E4Orf3, and at least a partial deletion of E4Orf4, F. an E4 deletion of at least a partial deletion of E4Orf2, at least a partial deletion of E4Orf3, and at least a partial deletion of E4Orf4, G. an E4 deletion of at least a partial deletion of E4Orf1, a fully deleted E4Orf2, and at least a partial deletion of E4Orf3, or H. an E4 deletion of at least a partial deletion of E4Orf2 and at least a partial deletion of E4Orf3. In some aspects, the ChAdV68 vector backbone comprises at least nucleotides 2 to 36,518 of the sequence set forth in SEQ ID NO:1, wherein the nucleotides 2 to 36,518 lack: (1) nucleotides 577 to 3403 of the sequence shown in SEQ ID NO:1 corresponding to an E1 deletion; (2) nucleotides 27,125 to 31,825 of the sequence shown in SEQ ID NO:1 corresponding to an E3 deletion; and (3) nucleotides 34,916 to 35,642 of the sequence shown in SEQ ID NO:1 corresponding to a partial E4 deletion; optionally wherein the antigen cassette is inserted within the E1 deletion. In some aspects, the ChAdV68 vector backbone comprises the sequence set forth in SEQ ID NO: 29369, optionally wherein the antigen cassette is inserted within the E1 deletion. In some aspects, the ChAdV68 vector backbone comprises at least nucleotides 2 to 36,518 of the sequence set forth in SEQ ID NO:1, wherein the nucleotides 2 to 36,518 lack: A. nucleotides 577 to 3403 of the sequence shown in SEQ ID NO:1 corresponding to an E1 deletion; B. nucleotides 27,125 to 31,825 of the sequence shown in SEQ ID NO:1 corresponding to an E3 deletion; C. nucleotides 34,916 to 35,642 of the sequence shown in SEQ ID NO:1 corresponding to a partial E4 deletion; D. nucleotides 456 to 3014 of the sequence shown in SEQ ID NO:1; E. nucleotides 27,816 to 31,333 of the sequence shown in SEQ ID NO:1; F. nucleotides 3957 to 10346 of the sequence shown in SEQ ID NO:1; G. nucleotides 21787 to 23370 of the sequence shown in SEQ ID NO:1; H. nucleotides 33486 to 36193 of the sequence shown in SEQ ID NO:1; or combinations thereof. In some aspects, the ChAdV68 vector backbone comprises at least nucleotides 2 to 36,518 of the sequence set forth in SEQ ID NO:1, wherein the nucleotides 2 to 36,518 lack: (1) nucleotides 577 to 3403 of the sequence shown in SEQ ID NO:1 corresponding to an E1 deletion and (2) nucleotides 27,125 to 31,825 of the sequence shown in SEQ ID NO:1 corresponding to an E3 deletion.

[0058] In some aspects, the ChAdV68 vector backbone comprises the sequence set forth in SEQ ID NO:1, except that the sequence is fully deleted or functionally deleted in at least one gene selected from the group consisting of the chimpanzee adenovirus E1A, E1B, E2A, E2B, E3, E4, L1, L2, L3, L4, and L5 genes of the sequence set forth in SEQ ID NO: 1, optionally wherein the sequence is fully deleted or functionally deleted in: (1) E1A and E1B; (2) E1A, E1B, and E3; or (3) E1A, E1B, E3, and E4 of the sequence set forth in SEQ ID NO: 1. In some aspects, the ChAdV68 vector backbone comprises a gene or regulatory sequence obtained from the sequence of SEQ ID NO: 1, optionally wherein the gene is selected from the group consisting of the chimpanzee adenovirus inverted terminal repeat (ITR), E1A, E1B, E2A, E2B, E3, E4, L1, L2, L3, L4, and L5 genes of the sequence set forth in SEQ ID NO: 1 In some aspects, the ChAdV68 vector backbone comprises one or more deletions between base pair number 577 and 3403 or between base pair 456 and 3014, and optionally wherein the vector further comprises one or more deletions between base pair 27,125 and 31,825 or between base pair 27,816 and 31,333 of the sequence set forth in SEQ ID NO:1. In some aspects, the ChAdV68 vector backbone comprises one or more deletions between base pair number 3957 and 10346, base pair number 21787 and 23370, and base pair number 33486 and 36193 of the sequence set forth in SEQ ID NO:1.

[0059] In some aspects, the cassette is inserted in the ChAdV backbone at the E1 region, E3 region, and/or any deleted AdV region that allows incorporation of the cassette. In some aspects, the ChAdV backbone is generated from one of a first generation, a second generation, or a helper-dependent adenoviral vector.

[0060] In some aspects, the at least one promoter nucleotide sequence is selected from the group consisting of: a CMV, a SV40, an EF-1, a RSV, a PGK, a HSA, a MCK, and a EBV promoter sequence. In some aspects, the at least one promoter nucleotide sequence is a CMV promoter sequence.

[0061] In some aspects, at least one of the epitope-encoding nucleic acid sequences encodes an epitope that, when expressed and translated, is capable of being presented by MHC class I on a cell of the subject. In some aspects, at least one of the epitope-encoding nucleic acid sequences encodes an epitope that, when expressed and translated, is capable of being presented by MHC class II on a cell of the subject.

[0062] In some aspects, the at least one antigen-encoding nucleic acid sequence comprises two or more antigen-encoding nucleic acid sequences. In some aspects, each antigen-encoding nucleic acid sequence is linked directly to one another.

[0063] In some aspects, each antigen-encoding nucleic acid sequence is linked to a distinct antigen-encoding nucleic acid sequence with a nucleic acid sequence encoding a linker. In some aspects, the linker links two MHC class I epitope-encoding nucleic acid sequences or an MHC class I epitope-encoding nucleic acid sequence to an MHC class II epitope-encoding nucleic acid sequence. In some aspects, the linker is selected from the group consisting of: (1) consecutive glycine residues, at least 2, 3, 4, 5, 6, 7, 8, 9, or 10 residues in length (SEQ ID NO:29525); (2) consecutive alanine residues, at least 2, 3, 4, 5, 6, 7, 8, 9, or 10 residues in length (SEQ ID NO:29526); (3) two arginine residues (RR); (4) alanine, alanine, tyrosine (AAY); (5) a consensus sequence at least 2, 3, 4, 5, 6, 7, 8, 9, or 10 amino acid residues in length that is processed efficiently by a mammalian proteasome; and (6) one or more native sequences flanking the antigen derived from the cognate protein of origin and that is at least 2, 3, 4, 5, 6, 7, 8, 9, 10, 11, 12, 13, 14, 15, 16, 17, 18, 19, 20, or 2-20 amino acid residues in length. In some aspects, the linker links two MHC class II epitope-encoding nucleic acid sequences or an MHC class II sequence to an MHC class I epitope-encoding nucleic acid sequence. In some aspects, the linker comprises the sequence GPGPG (SEQ ID NO:29524).

[0064] In some aspects, the antigen-encoding nucleic acid sequences is linked, operably or directly, to a separate or contiguous sequence that enhances the expression, stability, cell trafficking, processing and presentation, and/or immunogenicity of the antigen-encoding nucleic acid sequence. In some aspects, the separate or contiguous sequence comprises at least one of: a ubiquitin sequence, a ubiquitin sequence modified to increase proteasome targeting (e.g., the ubiquitin sequence contains a Gly to Ala substitution at position 76), an immunoglobulin signal sequence (e.g., IgK), a major histocompatibility class I sequence, lysosomal-associated membrane protein (LAMP)-1, human dendritic cell lysosomal-associated membrane protein, and a major histocompatibility class II sequence; optionally wherein the ubiquitin sequence modified to increase proteasome targeting is A76.

[0065] In some aspects, the epitope-encoding nucleic acid sequence comprises at least one alteration that makes the encoded epitope have increased binding affinity to its corresponding MHC allele relative to the translated, corresponding wild-type nucleic acid sequence. In some aspects, the epitope-encoding nucleic acid sequence comprises at least one alteration that makes the encoded epitope have increased binding stability to its corresponding MHC allele relative to the translated, corresponding wild-type nucleic acid sequence. In some aspects, the epitope-encoding nucleic acid sequence comprises at least one alteration that makes the encoded epitope have an increased likelihood of presentation on its corresponding MHC allele relative to the translated, corresponding wild-type nucleic acid sequence. In some aspects, the at least one alteration comprises a point mutation, a frameshift mutation, a non-frameshift mutation, a deletion mutation, an insertion mutation, a splice variant, a genomic rearrangement, or a proteasome-generated spliced antigen.

[0066] In some aspects, the epitope-encoding nucleic acid sequence encodes an epitope known or suspected to be expressed in the subject known or suspected to have cancer. In some aspects, the cancer comprises a solid tumor. In some aspects, the cancer is selected from the group consisting of: lung cancer, melanoma, breast cancer, ovarian cancer, prostate cancer, kidney cancer, gastric cancer, colon cancer, testicular cancer, head and neck cancer, pancreatic cancer, bladder cancer, brain cancer, B-cell lymphoma, acute myelogenous leukemia, adult acute lymphoblastic leukemia, chronic myelogenous leukemia, chronic lymphocytic leukemia, T cell lymphocytic leukemia, non-small cell lung cancer, and small cell lung cancer.

[0067] In some aspects, the at least one antigen-encoding nucleic acid sequence comprises at least 2-10, 2, 3, 4, 5, 6, 7, 8, 9, or 10 antigen-encoding nucleic acid sequences, optionally wherein each antigen-encoding nucleic acid sequence encodes a distinct antigen-encoding nucleic acid sequence. In some aspects, the at least one antigen-encoding nucleic acid sequence comprises at least 11-20, 15-20, 11-100, 11-200, 11-300, 11-400, 11, 12, 13, 14, 15, 16, 17, 18, 19, 20 or up to 400 antigen-encoding nucleic acid sequences, optionally wherein each antigen-encoding nucleic acid sequence encodes a distinct antigen-encoding nucleic acid sequence. In some aspects, the at least one antigen-encoding nucleic acid sequence comprises at least 11-20, 15-20, 11-100, 11-200, 11-300, 11-400, 11, 12, 13, 14, 15, 16, 17, 18, 19, 20 or up to 400 antigen-encoding nucleic acid sequences. In some aspects, the at least one antigen-encoding nucleic acid sequence comprises at least 2-400 antigen-encoding nucleic acid sequences and wherein at least two of the antigen-encoding nucleic acid sequences encode epitope sequences or portions thereof that are presented by MHC class I on a cell surface. In some aspects, at least two of the MHC class I epitopes are presented by MHC class I on the tumor cell surface.

[0068] In some aspects, the epitope-encoding nucleic acid sequences comprises at least one MHC class I epitope-encoding nucleic acid sequence, and wherein each antigen-encoding nucleic acid sequence encodes a polypeptide sequence between 8 and 35 amino acids in length, optionally 9-17, 9-25, 8, 9, 10, 11, 12, 13, 14, 15, 16, 17, 18, 19, 20, 21, 22, 23, 24, 25, 26, 27, 28, 29, 30, 31, 32, 33, 34 or 35 amino acids in length.

[0069] In some aspects, the at least one MHC class II epitope-encoding nucleic acid sequence is present. In some aspects, the at least one MHC class II epitope-encoding nucleic acid sequence is present and comprises at least one MHC class II epitope-encoding nucleic acid sequence that comprises at least one alteration that makes the encoded epitope sequence distinct from the corresponding peptide sequence encoded by a wild-type nucleic acid sequence. In some aspects, the epitope-encoding nucleic acid sequence comprises an MHC class II epitope-encoding nucleic acid sequence and wherein each antigen-encoding nucleic acid sequence encodes a polypeptide sequence that is 12-20, 12, 13, 14, 15, 16, 17, 18, 19, 20, or 20-40 amino acids in length. In some aspects, the epitope-encoding nucleic acid sequences comprises an MHC class II epitope-encoding nucleic acid sequence, wherein the at least one MHC class II epitope-encoding nucleic acid sequence is present, and wherein the at least one MHC class II epitope-encoding nucleic acid sequence comprises at least one universal MHC class II epitope-encoding nucleic acid sequence, optionally wherein the at least one universal sequence comprises at least one of Tetanus toxoid and PADRE.

[0070] In some aspects, the at least one promoter nucleotide sequence is inducible. In some aspects, wherein the at least one promoter nucleotide sequence is non-inducible. In some aspects, the at least one poly(A) sequence comprises a Bovine Growth Hormone (BGH) SV40 polyA sequence. In some aspects, the at least one poly(A) sequence is at least 20, at least 30, at least 40, at least 50, at least 60, at least 70, at least 80, or at least 90 consecutive A nucleotides. In some aspects, the at least one poly(A) sequence is at least 100 consecutive A nucleotides (SEQ ID NO:29527).

[0071] In some aspects, the cassette further comprises at least one of: an intron sequence, a woodchuck hepatitis virus posttranscriptional regulatory element (WPRE) sequence, an internal ribosome entry sequence (IRES) sequence, a nucleotide sequence encoding a 2A self cleaving peptide sequence, a nucleotide sequence encoding a Furin cleavage site, or a sequence in the 5′ or 3′ non-coding region known to enhance the nuclear export, stability, or translation efficiency of mRNA that is operably linked to at least one of the at least one antigen-encoding nucleic acid sequences. In some aspects, the cassette further comprises a reporter gene, including but not limited to, green fluorescent protein (GFP), a GFP variant, secreted alkaline phosphatase, luciferase, a luciferase variant, or a detectable peptide or epitope. In some aspects, the detectable peptide or epitope is selected from the group consisting of an HA tag, a Flag tag, a His-tag, or a V5 tag.

[0072] In some aspects, the one or more vectors further comprises one or more nucleic acid sequences encoding at least one immune modulator. In some aspects, the immune modulator is an anti-CTLA4 antibody or an antigen-binding fragment thereof, an anti-PD-1 antibody or an antigen-binding fragment thereof, an anti-PD-L1 antibody or an antigen-binding fragment thereof, an anti-4-1BB antibody or an antigen-binding fragment thereof, or an anti-OX-40 antibody or an antigen-binding fragment thereof. In some aspects, the antibody or antigen-binding fragment thereof is a Fab fragment, a Fab′ fragment, a single chain Fv (scFv), a single domain antibody (sdAb) either as single specific or multiple specificities linked together (e.g., camelid antibody domains), or full-length single-chain antibody (e.g., full-length IgG with heavy and light chains linked by a flexible linker). In some aspects, the heavy and light chain sequences of the antibody are a contiguous sequence separated by either a self-cleaving sequence such as 2A or IRES; or the heavy and light chain sequences of the antibody are linked by a flexible linker such as consecutive glycine residues. In some aspects, the immune modulator is a cytokine. In some aspects, the cytokine is at least one of IL-2, IL-7, IL-12, IL-15, or IL-21 or variants thereof of each.

[0073] In some aspects, the epitope-encoding nucleic acid sequence comprises a MHC class I epitope-encoding nucleic acid sequence, and wherein the MHC class I epitope-encoding nucleic acid sequence is selected by performing the steps of: (a) obtaining at least one of exome, transcriptome, or whole genome tumor nucleotide sequencing data from the tumor, wherein the tumor nucleotide sequencing data is used to obtain data representing peptide sequences of each of a set of epitopes; (b) inputting the peptide sequence of each epitope into a presentation model to generate a set of numerical likelihoods that each of the epitopes is presented by one or more of the MHC alleles on the tumor cell surface of the tumor, the set of numerical likelihoods having been identified at least based on received mass spectrometry data; and (c) selecting a subset of the set of epitopes based on the set of numerical likelihoods to generate a set of selected epitopes which are used to generate the MHC class I epitope-encoding nucleic acid sequence. In some aspects, each of the MHC class I epitope-encoding nucleic acid sequences is selected by performing the steps of: (a) obtaining at least one of exome, transcriptome, or whole genome tumor nucleotide sequencing data from the tumor, wherein the tumor nucleotide sequencing data is used to obtain data representing peptide sequences of each of a set of epitopes; (b) inputting the peptide sequence of each epitope into a presentation model to generate a set of numerical likelihoods that each of the epitopes is presented by one or more of the MHC alleles on the tumor cell surface of the tumor, the set of numerical likelihoods having been identified at least based on received mass spectrometry data; and (c) selecting a subset of the set of epitopes based on the set of numerical likelihoods to generate a set of selected epitopes which are used to generate the at least 20 MHC class I epitope-encoding nucleic acid sequences. In some aspects, a number of the set of selected epitopes is 2-20. In some aspects, the presentation model represents dependence between: (a) presence of a pair of a particular one of the MHC alleles and a particular amino acid at a particular position of a peptide sequence; and (b) likelihood of presentation on the tumor cell surface, by the particular one of the MHC alleles of the pair, of such a peptide sequence comprising the particular amino acid at the particular position. In some aspects, selecting the set of selected epitopes comprises selecting epitopes that have an increased likelihood of being presented on the tumor cell surface relative to unselected epitopes based on the presentation model. In some aspects, selecting the set of selected epitopes comprises selecting epitopes that have an increased likelihood of being capable of inducing a tumor-specific immune response in the subject relative to unselected epitopes based on the presentation model. In some aspects, selecting the set of selected epitopes comprises selecting epitopes that have an increased likelihood of being capable of being presented to naïve T cells by professional antigen presenting cells (APCs) relative to unselected epitopes based on the presentation model, optionally wherein the APC is a dendritic cell (DC). In some aspects, selecting the set of selected epitopes comprises selecting epitopes that have a decreased likelihood of being subject to inhibition via central or peripheral tolerance relative to unselected epitopes based on the presentation model. In some aspects, selecting the set of selected epitopes comprises selecting epitopes that have a decreased likelihood of being capable of inducing an autoimmune response to normal tissue in the subject relative to unselected epitopes based on the presentation model. In some aspects, exome or transcriptome nucleotide sequencing data is obtained by performing sequencing on the tumor tissue. In some aspects, the sequencing is next generation sequencing (NGS) or any massively parallel sequencing approach.

[0074] In some aspects, the cassette comprises junctional epitope sequences formed by adjacent sequences in the cassette. In some aspects, at least one or each junctional epitope sequence has an affinity of greater than 500 nM for MHC. In some aspects, each junctional epitope sequence is non-self.

[0075] In some aspects, the cassette does not encode a non-therapeutic MHC class I or class II epitope nucleic acid sequence comprising a translated, wild-type nucleic acid sequence, wherein the non-therapeutic epitope is predicted to be displayed on an MHC allele of the subject. In some aspects, the non-therapeutic predicted MHC class I or class II epitope sequence is a junctional epitope sequence formed by adjacent sequences in the cassette. In some aspects, the prediction is based on presentation likelihoods generated by inputting sequences of the non-therapeutic epitopes into a presentation model. In some aspects, an order of the antigen-encoding nucleic acid sequences in the cassette is determined by a series of steps comprising: (a) generating a set of candidate cassette sequences corresponding to different orders of the antigen-encoding nucleic acid sequences; (b) determining, for each candidate cassette sequence, a presentation score based on presentation of non-therapeutic epitopes in the candidate cassette sequence; and (c) selecting a candidate cassette sequence associated with a presentation score below a predetermined threshold as the cassette sequence for a vaccine.

[0076] In some aspects, the composition for delivery of the ChAdV-based expression system is formulated in a pharmaceutical composition comprising a pharmaceutically acceptable carrier.

[0077] In some aspects, one or more of the epitope-encoding nucleic acid sequences are derived from a tumor of the subject. In some aspects, each of the epitope-encoding nucleic acid sequences are derived from a tumor of the subject. In some aspects, one or more of the epitope-encoding nucleic acid sequences are not derived from a tumor of the subject. In some aspects, each of the epitope-encoding nucleic acid sequences are not derived from a tumor of the subject. In some aspects, the epitope-encoding nucleic acid sequence comprises an epitope selected from the group consisting of SEQ ID NO: 57-29,364

[0078] In some aspects, the cassette of the composition for delivery of the ChAdV-based expression system is identical to the cassette of the composition for delivery of the self-replicating alphavirus-based expression system. In some aspects, the cassette of the composition for delivery of the self-replicating alphavirus-based expression system for each of the doses is identical.

### BRIEF DESCRIPTION OF THE SEVERAL VIEWS OF THE DRAWINGS

[0079] These and other features, aspects, and advantages of the present invention will become better understood with regard to the following description, and accompanying drawings, where:

[0080] FIG. 1 presents a schematic illustrating a maintenance therapy clinical strategy.

[0081] FIG. 2 presents a schematic illustrating an adjuvant therapy clinical strategy.

[0082] FIG. 3 presents clinical maintenance therapy dosing regimens. STS=study treatment stage. VPS=vaccine production stage. SOC=standard of care

### DETAILED DESCRIPTION

### I. Definitions

[0083] In general, terms used in the claims and the specification are intended to be construed as having the plain meaning understood by a person of ordinary skill in the art. Certain terms are defined below to provide additional clarity. In case of conflict between the plain meaning and the provided definitions, the provided definitions are to be used.

[0084] As used herein the term “antigen” is a substance that stimulates an immune response. An antigen can be a neoantigen. An antigen can be a “shared antigen” that is an antigen found among a specific population, e.g., a specific population of cancer patients.

[0085] As used herein the term “neoantigen” is an antigen that has at least one alteration that makes it distinct from the corresponding wild-type antigen, e.g., via mutation in a tumor cell or post-translational modification specific to a tumor cell. A neoantigen can include a polypeptide sequence or a nucleotide sequence. A mutation can include a frameshift or non-frameshift indel, missense or nonsense substitution, splice site alteration, genomic rearrangement or gene fusion, or any genomic or expression alteration giving rise to a neoORF. A mutations can also include a splice variant. Post-translational modifications specific to a tumor cell can include aberrant phosphorylation. Post-translational modifications specific to a tumor cell can also include a proteasome-generated spliced antigen. See Liepe et al., A large fraction of HLA class I ligands are proteasome-generated spliced peptides; Science. 2016 Oct. 21; 354(6310):354-358. Exemplary shared neoantigens are shown in Table A and in the AACR GENIE Results (SEQ ID NO:10,755-29,357); corresponding HLA allele(s) for each antigen are also shown. Such shared neoantigens are useful for inducing an immune response in a subject via administration. The subject can be identified for administration through the use of various diagnostic methods, e.g., patient selection methods described further below.

[0086] As used herein the term “tumor antigen” is an antigen present in a subject's tumor cell or tissue but not in the subject's corresponding normal cell or tissue, or derived from a polypeptide known to or have been found to have altered expression in a tumor cell or cancerous tissue in comparison to a normal cell or tissue.

[0087] As used herein the term “antigen-based vaccine” is a vaccine composition based on one or more antigens, e.g., a plurality of antigens. The vaccines can be nucleotide-based (e.g., virally based, RNA based, or DNA based), protein-based (e.g., peptide based), or a combination thereof.

[0088] As used herein the term “candidate antigen” is a mutation or other aberration giving rise to a sequence that may represent an antigen.

[0089] As used herein the term “coding region” is the portion(s) of a gene that encode protein.

[0090] As used herein the term “coding mutation” is a mutation occurring in a coding region.

[0091] As used herein the term “ORF” means open reading frame.

[0092] As used herein the term “NEO-ORF” is a tumor-specific ORF arising from a mutation or other aberration such as splicing.

[0093] As used herein the term “missense mutation” is a mutation causing a substitution from one amino acid to another.

[0094] As used herein the term “nonsense mutation” is a mutation causing a substitution from an amino acid to a stop codon or causing removal of a canonical start codon.

[0095] As used herein the term “frameshift mutation” is a mutation causing a change in the frame of the protein.

[0096] As used herein the term “indel” is an insertion or deletion of one or more nucleic acids.

[0097] As used herein, the term percent “identity,” in the context of two or more nucleic acid or polypeptide sequences, refer to two or more sequences or subsequences that have a specified percentage of nucleotides or amino acid residues that are the same, when compared and aligned for maximum correspondence, as measured using one of the sequence comparison algorithms described below (e.g., BLASTP and BLASTN or other algorithms available to persons of skill) or by visual inspection. Depending on the application, the percent “identity” can exist over a region of the sequence being compared, e.g., over a functional domain, or, alternatively, exist over the full length of the two sequences to be compared.

[0098] For sequence comparison, typically one sequence acts as a reference sequence to which test sequences are compared. When using a sequence comparison algorithm, test and reference sequences are input into a computer, subsequence coordinates are designated, if necessary, and sequence algorithm program parameters are designated. The sequence comparison algorithm then calculates the percent sequence identity for the test sequence(s) relative to the reference sequence, based on the designated program parameters. Alternatively, sequence similarity or dissimilarity can be established by the combined presence or absence of particular nucleotides, or, for translated sequences, amino acids at selected sequence positions (e.g., sequence motifs).

[0099] Optimal alignment of sequences for comparison can be conducted, e.g., by the local homology algorithm of Smith & Waterman, Adv. Appl. Math. 2:482 (1981), by the homology alignment algorithm of Needleman & Wunsch, J. Mol. Biol. 48:443 (1970), by the search for similarity method of Pearson & Lipman, Proc. Nat'l. Acad. Sci. USA 85:2444 (1988), by computerized implementations of these algorithms (GAP, BESTFIT, FASTA, and TFASTA in the Wisconsin Genetics Software Package, Genetics Computer Group, 575 Science Dr., Madison, Wis.), or by visual inspection (see generally Ausubel et al., infra).

[0100] One example of an algorithm that is suitable for determining percent sequence identity and sequence similarity is the BLAST algorithm, which is described in Altschul et al., J. Mol. Biol. 215:403-410 (1990). Software for performing BLAST analyses is publicly available through the National Center for Biotechnology Information.

[0101] As used herein the term “non-stop or read-through” is a mutation causing the removal of the natural stop codon.

[0102] As used herein the term “epitope” is the specific portion of an antigen typically bound by an antibody or T cell receptor.

[0103] As used herein the term “immunogenic” is the ability to stimulate an immune response, e.g., via T cells, B cells, or both.

[0104] As used herein the term “HLA binding affinity” “MHC binding affinity” means affinity of binding between a specific antigen and a specific MHC allele.

[0105] As used herein the term “bait” is a nucleic acid probe used to enrich a specific sequence of DNA or RNA from a sample.

[0106] As used herein the term “variant” is a difference between a subject's nucleic acids and the reference human genome used as a control.

[0107] As used herein the term “variant call” is an algorithmic determination of the presence of a variant, typically from sequencing.

[0108] As used herein the term “polymorphism” is a germline variant, i.e., a variant found in all DNA-bearing cells of an individual.

[0109] As used herein the term “somatic variant” is a variant arising in non-germline cells of an individual.

[0110] As used herein the term “allele” is a version of a gene or a version of a genetic sequence or a version of a protein.

[0111] As used herein the term “HLA type” is the complement of HLA gene alleles.

[0112] As used herein the term “nonsense-mediated decay” or “NMD” is a degradation of an mRNA by a cell due to a premature stop codon.

[0113] As used herein the term “truncal mutation” is a mutation originating early in the development of a tumor and present in a substantial portion of the tumor's cells.

[0114] As used herein the term “subclonal mutation” is a mutation originating later in the development of a tumor and present in only a subset of the tumor's cells.

[0115] As used herein the term “exome” is a subset of the genome that codes for proteins. An exome can be the collective exons of a genome.

[0116] As used herein the term “logistic regression” is a regression model for binary data from statistics where the logit of the probability that the dependent variable is equal to one is modeled as a linear function of the dependent variables.

[0117] As used herein the term “neural network” is a machine learning model for classification or regression consisting of multiple layers of linear transformations followed by element-wise nonlinearities typically trained via stochastic gradient descent and back-propagation.

[0118] As used herein the term “proteome” is the set of all proteins expressed and/or translated by a cell, group of cells, or individual.

[0119] As used herein the term “peptidome” is the set of all peptides presented by MHC-I or MHC-II on the cell surface. The peptidome may refer to a property of a cell or a collection of cells (e.g., the tumor peptidome, meaning the union of the peptidomes of all cells that comprise the tumor).

[0120] As used herein the term “ELISpot” means Enzyme-linked immunosorbent spot assay—which is a common method for monitoring immune responses in humans and animals.

[0121] As used herein the term “dextramers” is a dextran-based peptide-MHC multimers used for antigen-specific T-cell staining in flow cytometry.

[0122] As used herein the term “tolerance or immune tolerance” is a state of immune non-responsiveness to one or more antigens, e.g. self-antigens.

[0123] As used herein the term “central tolerance” is a tolerance affected in the thymus, either by deleting self-reactive T-cell clones or by promoting self-reactive T-cell clones to differentiate into immunosuppressive regulatory T-cells (Tregs).

[0124] As used herein the term “peripheral tolerance” is a tolerance affected in the periphery by downregulating or anergizing self-reactive T-cells that survive central tolerance or promoting these T cells to differentiate into Tregs.

[0125] The term “sample” can include a single cell or multiple cells or fragments of cells or an aliquot of body fluid, taken from a subject, by means including venipuncture, excretion, ejaculation, massage, biopsy, needle aspirate, lavage sample, scraping, surgical incision, or intervention or other means known in the art.

[0126] The term “subject” encompasses a cell, tissue, or organism, human or non-human, whether in vivo, ex vivo, or in vitro, male or female. The term subject is inclusive of mammals including humans.

[0127] The term “mammal” encompasses both humans and non-humans and includes but is not limited to humans, non-human primates, canines, felines, murines, bovines, equines, and porcines.

[0128] The term “clinical factor” refers to a measure of a condition of a subject, e.g., disease activity or severity. “Clinical factor” encompasses all markers of a subject's health status, including non-sample markers, and/or other characteristics of a subject, such as, without limitation, age and gender. A clinical factor can be a score, a value, or a set of values that can be obtained from evaluation of a sample (or population of samples) from a subject or a subject under a determined condition. A clinical factor can also be predicted by markers and/or other parameters such as gene expression surrogates. Clinical factors can include tumor type, tumor sub-type, and smoking history.

[0129] The term “antigen-encoding nucleic acid sequences derived from a tumor” refers to nucleic acid sequences obtained from the tumor, e.g. via RT-PCR; or sequence data obtained by sequencing the tumor and then synthesizing the nucleic acid sequences using the sequencing data, e.g., via various synthetic or PCR-based methods known in the art. Derived sequences can include nucleic acid sequence variants, such as sequence-optimized nucleic acid sequence variants (e.g., codon-optimized and/or otherwise optimized for expression), that encode the same polypeptide sequence as the corresponding native nucleic acid sequence obtained from a tumor.

[0130] The term “alphavirus” refers to members of the family Togaviridae, and are positive-sense single-stranded RNA viruses. Alphaviruses are typically classified as either Old World, such as Sindbis, Ross River, Mayaro, Chikungunya, and Semliki Forest viruses, or New World, such as eastern equine encephalitis, Aura, Fort Morgan, or Venezuelan equine encephalitis and its derivative strain TC-83. Alphaviruses are typically self-replicating RNA viruses.

[0131] The term “alphavirus backbone” refers to minimal sequence(s) of an alphavirus that allow for self-replication of the viral genome. Minimal sequences can include conserved sequences for nonstructural protein-mediated amplification, a nonstructural protein 1 (nsP1) gene, a nsP2 gene, a nsP3 gene, a nsP4 gene, and a polyA sequence, as well as sequences for expression of subgenomic viral RNA including a subgenomic (e.g., a 26S) promoter element.

[0132] The term “sequences for nonstructural protein-mediated amplification” includes alphavirus conserved sequence elements (CSE) well known to those in the art. CSEs include, but are not limited to, an alphavirus 5′ UTR, a 51-nt CSE, a 24-nt CSE, a subgenomic promoter sequence (e.g., a 26S subgenomic promoter sequence), a 19-nt CSE, and an alphavirus 3′ UTR. The term “RNA polymerase” includes polymerases that catalyze the production of RNA polynucleotides from a DNA template. RNA polymerases include, but are not limited to, bacteriophage derived polymerases including T3, T7, and SP6.

[0133] The term “lipid” includes hydrophobic and/or amphiphilic molecules. Lipids can be cationic, anionic, or neutral. Lipids can be synthetic or naturally derived, and in some instances biodegradable. Lipids can include cholesterol, phospholipids, lipid conjugates including, but not limited to, polyethyleneglycol (PEG) conjugates (PEGylated lipids), waxes, oils, glycerides, fats, and fat-soluble vitamins. Lipids can also include dilinoleylmethyl-4-dimethylaminobutyrate (MC3) and MC3-like molecules.

[0134] The term “lipid nanoparticle” or “LNP” includes vesicle like structures formed using a lipid containing membrane surrounding an aqueous interior, also referred to as liposomes. Lipid nanoparticles includes lipid-based compositions with a solid lipid core stabilized by a surfactant. The core lipids can be fatty acids, acylglycerols, waxes, and mixtures of these surfactants. Biological membrane lipids such as phospholipids, sphingomyelins, bile salts (sodium taurocholate), and sterols (cholesterol) can be utilized as stabilizers. Lipid nanoparticles can be formed using defined ratios of different lipid molecules, including, but not limited to, defined ratios of one or more cationic, anionic, or neutral lipids. Lipid nanoparticles can encapsulate molecules within an outer-membrane shell and subsequently can be contacted with target cells to deliver the encapsulated molecules to the host cell cytosol. Lipid nanoparticles can be modified or functionalized with non-lipid molecules, including on their surface. Lipid nanoparticles can be single-layered (unilamellar) or multi-layered (multilamellar). Lipid nanoparticles can be complexed with nucleic acid. Unilamellar lipid nanoparticles can be complexed with nucleic acid, wherein the nucleic acid is in the aqueous interior. Multilamellar lipid nanoparticles can be complexed with nucleic acid, wherein the nucleic acid is in the aqueous interior, or to form or sandwiched between.

[0135] The term “pharmaceutically effective amount” is an amount of a vaccine component (such as a peptide, engineered vector, and/or adjuvant) that is effective in a route of administration to provide a cell with sufficient levels of protein, protein expression, and/or cell-signaling activity (e.g., adjuvant-mediated activation) to provide a vaccinal benefit, i.e., some measurable level of immunity.

[0136] Abbreviations: MHC: major histocompatibility complex; HLA: human leukocyte antigen, or the human MHC gene locus; NGS: next-generation sequencing; PPV: positive predictive value; TSNA: tumor-specific neoantigen; FFPE: formalin-fixed, paraffin-embedded; NMD: nonsense-mediated decay; NSCLC: non-small-cell lung cancer; DC: dendritic cell.

[0137] It should be noted that, as used in the specification and the appended claims, the singular forms “a,” “an,” and “the” include plural referents unless the context clearly dictates otherwise.

[0138] Unless specifically stated or otherwise apparent from context, as used herein the term “about” is understood as within a range of normal tolerance in the art, for example within 2 standard deviations of the mean. About can be understood as within 10%, 9%, 8%, 7%, 6%, 5%, 4%, 3%, 2%, 1%, 0.5%, 0.1%, 0.05%, or 0.01% of the stated value. Unless otherwise clear from context, all numerical values provided herein are modified by the term about.

[0139] Any terms not directly defined herein shall be understood to have the meanings commonly associated with them as understood within the art of the invention. Certain terms are discussed herein to provide additional guidance to the practitioner in describing the compositions, devices, methods and the like of aspects of the invention, and how to make or use them. It will be appreciated that the same thing may be said in more than one way. Consequently, alternative language and synonyms may be used for any one or more of the terms discussed herein. No significance is to be placed upon whether or not a term is elaborated or discussed herein. Some synonyms or substitutable methods, materials and the like are provided. Recital of one or a few synonyms or equivalents does not exclude use of other synonyms or equivalents, unless it is explicitly stated. Use of examples, including examples of terms, is for illustrative purposes only and does not limit the scope and meaning of the aspects of the invention herein.

[0140] All references, issued patents and patent applications cited within the body of the specification are hereby incorporated by reference in their entirety, for all purposes.

### II. Antigen Identification

[0141] Research methods for NGS analysis of tumor and normal exome and transcriptomes have been described and applied in the antigen identification space.^{6, 14, 15} Certain optimizations for greater sensitivity and specificity for antigen identification in the clinical setting can be considered. These optimizations can be grouped into two areas, those related to laboratory processes and those related to the NGS data analysis. The research methods described can also be applied to identification of antigens in other settings, such as identification of identifying antigens from an infectious disease organism, an infection in a subject, or an infected cell of a subject. Examples of optimizations are known to those skilled in the art, for example the methods described in more detail in U.S. Pat. No. 10,055,540, US Application Pub. No. US20200010849A1, U.S. application Ser. No. 16/606,577, and international patent application publications WO2020181240A1, WO/2018/195357 and WO/2018/208856, each herein incorporated by reference, in their entirety, for all purposes.

[0142] Methods for identifying shared antigens (e.g., neoantigens) include identifying antigens from a tumor of a subject that are likely to be presented on the cell surface of the tumor or immune cells, including professional antigen presenting cells such as dendritic cells, and/or are likely to be immunogenic. As an example, one such method may comprise the steps of: obtaining at least one of exome, transcriptome or whole genome tumor nucleotide sequencing and/or expression data from the tumor cell of the subject, wherein the tumor nucleotide sequencing and/or expression data is used to obtain data representing peptide sequences of each of a set of antigens (e.g., in the case of neoantigens wherein the peptide sequence of each neoantigen comprises at least one alteration that makes it distinct from the corresponding wild-type peptide sequence or in cases of shared antigens without a mutation where peptides are derived from any polypeptide known to or have been found to have altered expression in a tumor cell or cancerous tissue in comparison to a normal cell or tissue); inputting the peptide sequence of each antigen into one or more presentation models to generate a set of numerical likelihoods that each of the antigens is presented by one or more MHC alleles on the tumor cell surface of the tumor cell of the subject or cells present in the tumor, the set of numerical likelihoods having been identified at least based on received mass spectrometry data; and selecting a subset of the set of antigens based on the set of numerical likelihoods to generate a set of selected antigens.

### III. Identification of Tumor Specific Mutations in Neoantigens

[0143] Also disclosed herein are methods for the identification of certain mutations (e.g., the variants or alleles that are present in cancer cells). In particular, these mutations can be present in the genome, transcriptome, proteome, or exome of cancer cells of a subject having cancer but not in normal tissue from the subject. Specific methods for identifying neoantigens, including shared neoantigens, that are specific to tumors are known to those skilled in the art, for example the methods described in more detail in U.S. Pat. No. 10,055,540, US Application Pub. No. US20200010849A1, and international patent application publications WO/2018/195357 and WO/2018/208856, each herein incorporated by reference, in their entirety, for all purposes. Examples of shared neoantigens that are specific to tumors are described in more detail in international patent application publication WO2019226941A1, herein incorporated by reference in its entirety, for all purposes.

[0144] Genetic mutations in tumors can be considered useful for the immunological targeting of tumors if they lead to changes in the amino acid sequence of a protein exclusively in the tumor. Useful mutations include: (1) non-synonymous mutations leading to different amino acids in the protein; (2) read-through mutations in which a stop codon is modified or deleted, leading to translation of a longer protein with a novel tumor-specific sequence at the C-terminus; (3) splice site mutations that lead to the inclusion of an intron in the mature mRNA and thus a unique tumor-specific protein sequence; (4) chromosomal rearrangements that give rise to a chimeric protein with tumor-specific sequences at the junction of 2 proteins (i.e., gene fusion); (5) frameshift mutations or deletions that lead to a new open reading frame with a novel tumor-specific protein sequence. Mutations can also include one or more of non-frameshift indel, missense or nonsense substitution, splice site alteration, genomic rearrangement or gene fusion, or any genomic or expression alteration giving rise to a neoORF.

[0145] Peptides with mutations or mutated polypeptides arising from for example, splice-site, frameshift, readthrough, or gene fusion mutations in tumor cells can be identified by sequencing DNA, RNA or protein in tumor versus normal cells.

[0146] Also mutations can include previously identified tumor specific mutations. Known tumor mutations can be found at the Catalogue of Somatic Mutations in Cancer (COSMIC) database.

[0147] A variety of methods are available for detecting the presence of a particular mutation or allele in an individual's DNA or RNA. Advancements in this field have provided accurate, easy, and inexpensive large-scale SNP genotyping. For example, several techniques have been described including dynamic allele-specific hybridization (DASH), microplate array diagonal gel electrophoresis (MADGE), pyrosequencing, oligonucleotide-specific ligation, the TaqMan system as well as various DNA “chip” technologies such as the Affymetrix SNP chips. These methods utilize amplification of a target genetic region, typically by PCR. Still other methods, based on the generation of small signal molecules by invasive cleavage followed by mass spectrometry or immobilized padlock probes and rolling-circle amplification. Several of the methods known in the art for detecting specific mutations are summarized below.

[0148] PCR based detection means can include multiplex amplification of a plurality of markers simultaneously. For example, it is well known in the art to select PCR primers to generate PCR products that do not overlap in size and can be analyzed simultaneously. Alternatively, it is possible to amplify different markers with primers that are differentially labeled and thus can each be differentially detected. Of course, hybridization based detection means allow the differential detection of multiple PCR products in a sample. Other techniques are known in the art to allow multiplex analyses of a plurality of markers.

[0149] Several methods have been developed to facilitate analysis of single nucleotide polymorphisms in genomic DNA or cellular RNA. For example, a single base polymorphism can be detected by using a specialized exonuclease-resistant nucleotide, as disclosed, e.g., in Mundy, C. R. (U.S. Pat. No. 4,656,127). According to the method, a primer complementary to the allelic sequence immediately 3′ to the polymorphic site is permitted to hybridize to a target molecule obtained from a particular animal or human. If the polymorphic site on the target molecule contains a nucleotide that is complementary to the particular exonuclease-resistant nucleotide derivative present, then that derivative will be incorporated onto the end of the hybridized primer. Such incorporation renders the primer resistant to exonuclease, and thereby permits its detection. Since the identity of the exonuclease-resistant derivative of the sample is known, a finding that the primer has become resistant to exonucleases reveals that the nucleotide(s) present in the polymorphic site of the target molecule is complementary to that of the nucleotide derivative used in the reaction. This method has the advantage that it does not require the determination of large amounts of extraneous sequence data.

[0150] A solution-based method can be used for determining the identity of a nucleotide of a polymorphic site. Cohen, D. et al. (French Patent 2,650,840; PCT Appln. No. WO91/02087). As in the Mundy method of U.S. Pat. No. 4,656,127, a primer is employed that is complementary to allelic sequences immediately 3′ to a polymorphic site. The method determines the identity of the nucleotide of that site using labeled dideoxynucleotide derivatives, which, if complementary to the nucleotide of the polymorphic site will become incorporated onto the terminus of the primer.

[0151] An alternative method, known as Genetic Bit Analysis or GBA is described by Goelet, P. et al. (PCT Appln. No. 92/15712). The method of Goelet, P. et al. uses mixtures of labeled terminators and a primer that is complementary to the sequence 3′ to a polymorphic site. The labeled terminator that is incorporated is thus determined by, and complementary to, the nucleotide present in the polymorphic site of the target molecule being evaluated. In contrast to the method of Cohen et al. (French Patent 2,650,840; PCT Appln. No. WO91/02087) the method of Goelet, P. et al. can be a heterogeneous phase assay, in which the primer or the target molecule is immobilized to a solid phase.

[0152] Several primer-guided nucleotide incorporation procedures for assaying polymorphic sites in DNA have been described (Komher, J. S. et al., Nucl. Acids. Res. 17:7779-7784 (1989); Sokolov, B. P., Nucl. Acids Res. 18:3671 (1990); Syvanen, A.-C., et al., Genomics 8:684-692 (1990); Kuppuswamy, M. N. et al., Proc. Natl. Acad. Sci. (U.S.A.) 88:1143-1147 (1991); Prezant, T. R. et al., Hum. Mutat. 1:159-164 (1992); Ugozzoli, L. et al., GATA 9:107-112 (1992); Nyren, P. et al., Anal. Biochem. 208:171-175 (1993)). These methods differ from GBA in that they utilize incorporation of labeled deoxynucleotides to discriminate between bases at a polymorphic site. In such a format, since the signal is proportional to the number of deoxynucleotides incorporated, polymorphisms that occur in runs of the same nucleotide can result in signals that are proportional to the length of the run (Syvanen, A.-C., et al., Amer. J. Hum. Genet. 52:46-59 (1993)).

[0153] A number of initiatives obtain sequence information directly from millions of individual molecules of DNA or RNA in parallel. Real-time single molecule sequencing-by-synthesis technologies rely on the detection of fluorescent nucleotides as they are incorporated into a nascent strand of DNA that is complementary to the template being sequenced. In one method, oligonucleotides 30-50 bases in length are covalently anchored at the 5′ end to glass cover slips. These anchored strands perform two functions. First, they act as capture sites for the target template strands if the templates are configured with capture tails complementary to the surface-bound oligonucleotides. They also act as primers for the template directed primer extension that forms the basis of the sequence reading. The capture primers function as a fixed position site for sequence determination using multiple cycles of synthesis, detection, and chemical cleavage of the dye-linker to remove the dye. Each cycle includes adding the polymerase/labeled nucleotide mixture, rinsing, imaging and cleavage of dye. In an alternative method, polymerase is modified with a fluorescent donor molecule and immobilized on a glass slide, while each nucleotide is color-coded with an acceptor fluorescent moiety attached to a gamma-phosphate. The system detects the interaction between a fluorescently-tagged polymerase and a fluorescently modified nucleotide as the nucleotide becomes incorporated into the de novo chain. Other sequencing-by-synthesis technologies also exist.

[0154] Any suitable sequencing-by-synthesis platform can be used to identify mutations. As described above, four major sequencing-by-synthesis platforms are currently available: the Genome Sequencers from Roche/454 Life Sciences, the 1G Analyzer from Illumina/Solexa, the SOLiD system from Applied BioSystems, and the Heliscope system from Helicos Biosciences. Sequencing-by-synthesis platforms have also been described by Pacific BioSciences and VisiGen Biotechnologies. In some embodiments, a plurality of nucleic acid molecules being sequenced is bound to a support (e.g., solid support). To immobilize the nucleic acid on a support, a capture sequence/universal priming site can be added at the 3′ and/or 5′ end of the template. The nucleic acids can be bound to the support by hybridizing the capture sequence to a complementary sequence covalently attached to the support. The capture sequence (also referred to as a universal capture sequence) is a nucleic acid sequence complementary to a sequence attached to a support that may dually serve as a universal primer.

[0155] As an alternative to a capture sequence, a member of a coupling pair (such as, e.g., antibody/antigen, receptor/ligand, or the avidin-biotin pair as described in, e.g., US Patent Application No. 2006/0252077) can be linked to each fragment to be captured on a surface coated with a respective second member of that coupling pair.

[0156] Subsequent to the capture, the sequence can be analyzed, for example, by single molecule detection/sequencing, e.g., as described in the Examples and in U.S. Pat. No. 7,283,337, including template-dependent sequencing-by-synthesis. In sequencing-by-synthesis, the surface-bound molecule is exposed to a plurality of labeled nucleotide triphosphates in the presence of polymerase. The sequence of the template is determined by the order of labeled nucleotides incorporated into the 3′ end of the growing chain. This can be done in real time or can be done in a step-and-repeat mode. For real-time analysis, different optical labels to each nucleotide can be incorporated and multiple lasers can be utilized for stimulation of incorporated nucleotides.

[0157] Sequencing can also include other massively parallel sequencing or next generation sequencing (NGS) techniques and platforms. Additional examples of massively parallel sequencing techniques and platforms are the Illumina HiSeq or MiSeq, Thermo PGM or Proton, the Pac Bio RS II or Sequel, Qiagen's Gene Reader, and the Oxford Nanopore MinION. Additional similar current massively parallel sequencing technologies can be used, as well as future generations of these technologies.

[0158] Any cell type or tissue can be utilized to obtain nucleic acid samples for use in methods described herein. For example, a DNA or RNA sample can be obtained from a tumor or a bodily fluid, e.g., blood, obtained by known techniques (e.g. venipuncture) or saliva. Alternatively, nucleic acid tests can be performed on dry samples (e.g. hair or skin). In addition, a sample can be obtained for sequencing from a tumor and another sample can be obtained from normal tissue for sequencing where the normal tissue is of the same tissue type as the tumor. A sample can be obtained for sequencing from a tumor and another sample can be obtained from normal tissue for sequencing where the normal tissue is of a distinct tissue type relative to the tumor.

[0159] Tumors can include one or more of lung cancer, melanoma, breast cancer, ovarian cancer, prostate cancer, kidney cancer, gastric cancer, colon cancer, testicular cancer, head and neck cancer, pancreatic cancer, brain cancer, B-cell lymphoma, acute myelogenous leukemia, chronic myelogenous leukemia, chronic lymphocytic leukemia, and T cell lymphocytic leukemia, non-small cell lung cancer, and small cell lung cancer.

[0160] Alternatively, protein mass spectrometry can be used to identify or validate the presence of mutated peptides bound to MHC proteins on tumor cells. Peptides can be acid-eluted from tumor cells or from HLA molecules that are immunoprecipitated from tumor, and then identified using mass spectrometry.

### IV. Antigens

[0161] Antigens can include nucleotides or polypeptides. For example, an antigen can be an RNA sequence that encodes for a polypeptide sequence. Antigens useful in vaccines can therefore include nucleotide sequences or polypeptide sequences. Shared neoantigens are shown in Table A (see SEQ ID NO:10,755-21,015) and in the AACR GENIE results (see SEQ ID NO: 21,016-29,357). Shared antigens are shown in Table 1.2 (see SEQ ID NO:57-10,754).

[0162] Disclosed herein are isolated peptides that comprise tumor specific mutations identified by the methods disclosed herein, peptides that comprise known tumor specific mutations, and mutant polypeptides or fragments thereof identified by methods disclosed herein. Neoantigen peptides can be described in the context of their coding sequence where a neoantigen includes the nucleotide sequence (e.g., DNA or RNA) that codes for the related polypeptide sequence.

[0163] Also disclosed herein are peptides derived from any polypeptide known to or have been found to have altered expression in a tumor cell or cancerous tissue in comparison to a normal cell or tissue, for example any polypeptide known to or have been found to be aberrantly expressed in a tumor cell or cancerous tissue in comparison to a normal cell or tissue. Suitable polypeptides from which the antigenic peptides can be derived can be found for example in the COSMIC database. COSMIC curates comprehensive information on somatic mutations in human cancer. The peptide contains the tumor specific mutation. Tumor antigens (e.g., shared tumor antigens and tumor neoantigens) can include, but are not limited to, those described in U.S. application Ser. No. 17/058,128, herein incorporated by reference for all purposes. Antigen peptides can be described in the context of their coding sequence where an antigen includes the nucleotide sequence (e.g., DNA or RNA) that codes for the related polypeptide sequence. Antigens can be selected that are predicted to be presented on the cell surface of a cell, such as a tumor cell or an immune cell, including professional antigen presenting cells such as dendritic cells. Antigens can be selected that are predicted to be immunogenic.

[0164] One or more polypeptides encoded by an antigen nucleotide sequence can comprise at least one of: a binding affinity with MHC with an IC50 value of less than 1000 nM, for MHC Class I peptides a length of 8-15, 8, 9, 10, 11, 12, 13, 14, or 15 amino acids, presence of sequence motifs within or near the peptide promoting proteasome cleavage, and presence or sequence motifs promoting TAP transport. For MHC Class II peptides a length 6-30, 6, 7, 8, 9, 10, 11, 12, 13, 14, 15, 16, 17, 18, 19, 20, 21, 22, 23, 24, 25, 26, 27, 28, 29, or 30 amino acids, presence of sequence motifs within or near the peptide promoting cleavage by extracellular or lysosomal proteases (e.g., cathepsins) or HLA-DM catalyzed HLA binding.

[0165] One or more antigens can be presented on the surface of a tumor.

[0166] One or more antigens can be immunogenic in a subject having a tumor, e.g., capable of stimulating a T cell response and/or a B cell response in the subject. One or more antigens can be capable of stimulating a B cell response, such as the production of antibodies that recognize the one or more antigens (e.g., antibodies that recognize a tumor). Antibodies can recognize linear polypeptide sequences or recognize secondary and tertiary structures. Accordingly, B cell antigens can include linear polypeptide sequences or polypeptides having secondary and tertiary structures, including, but not limited to, full-length proteins, protein subunits, protein domains, or any polypeptide sequence known or predicted to have secondary and tertiary structures. Antigens capable of stimulating a B cell response to a tumor can be an antigen found on the surface of tumor cell. Antigens capable of eliciting a B cell response to a tumor can be an intracellular neoantigen expressed in a tumor.

[0167] One or more antigens can include a combination of antigens capable of stimulating a T cell response (e.g., peptides including predicted T cell epitope sequences) and distinct antigens capable of stimulating a B cell response (e.g., full-length proteins, protein subunits, protein domains).

[0168] One or more antigens that stimulate an autoimmune response in a subject can be excluded from consideration in the context of vaccine generation for a subject.

[0169] The size of at least one antigenic peptide molecule (e.g., an epitope sequence) can comprise, but is not limited to, about 5, about 6, about 7, about 8, about 9, about 10, about 11, about 12, about 13, about 14, about 15, about 16, about 17, about 18, about 19, about 20, about 21, about 22, about 23, about 24, about 25, about 26, about 27, about 28, about 29, about 30, about 31, about 32, about 33, about 34, about 35, about 36, about 37, about 38, about 39, about 40, about 41, about 42, about 43, about 44, about 45, about 46, about 47, about 48, about 49, about 50, about 60, about 70, about 80, about 90, about 100, about 110, about 120 or greater amino molecule residues, and any range derivable therein. In specific embodiments the antigenic peptide molecules are equal to or less than 50 amino acids.

[0170] Antigenic peptides and polypeptides can be: for MHC Class 115 residues or less in length and usually consist of between about 8 and about 11 residues, particularly 9 or 10 residues; for MHC Class II, 6-30 residues, inclusive.

[0171] If desirable, a longer peptide can be designed in several ways. In one case, when presentation likelihoods of peptides on HLA alleles are predicted or known, a longer peptide could consist of either: (1) individual presented peptides with an extensions of 2-5 amino acids toward the N- and C-terminus of each corresponding gene product; (2) a concatenation of some or all of the presented peptides with extended sequences for each. In another case, when sequencing reveals a long (>10 residues) neoepitope sequence present in the tumor (e.g. due to a frameshift, read-through or intron inclusion that leads to a novel peptide sequence), a longer peptide would consist of: (3) the entire stretch of novel tumor-specific amino acids—thus bypassing the need for computational or in vitro test-based selection of the strongest HLA-presented shorter peptide. In both cases, use of a longer peptide allows endogenous processing by patient cells and may lead to more effective antigen presentation and stimulation of T cell responses. Longer peptides can also include a full-length protein, a protein subunit, a protein domain, and combinations thereof of a peptide, such as those expressed in a tumor. Longer peptides (e.g., full-length protein, protein subunit, or protein domain) and combinations thereof can be included to stimulate a B cell response.

[0172] Antigenic peptides and polypeptides can be presented on an HLA protein. In some aspects antigenic peptides and polypeptides are presented on an HLA protein with greater affinity than a wild-type peptide. In some aspects, an antigenic peptide or polypeptide can have an IC50 of at least less than 5000 nM, at least less than 1000 nM, at least less than 500 nM, at least less than 250 nM, at least less than 200 nM, at least less than 150 nM, at least less than 100 nM, at least less than 50 nM or less.

[0173] In some aspects, antigenic peptides and polypeptides do not induce an autoimmune response and/or invoke immunological tolerance when administered to a subject.

[0174] Also provided are compositions comprising at least two or more antigenic peptides. In some embodiments the composition contains at least two distinct peptides. At least two distinct peptides can be derived from the same polypeptide. By distinct polypeptides is meant that the peptide vary by length, amino acid sequence, or both. A peptide can include a tumor-specific mutation. Tumor-specific peptides can be derived from any polypeptide known to or have been found to contain a tumor specific mutation or peptides derived from any polypeptide known to or have been found to have altered expression in a tumor cell or cancerous tissue in comparison to a normal cell or tissue, for example any polypeptide known to or have been found to be aberrantly expressed in a tumor cell or cancerous tissue in comparison to a normal cell or tissue. The peptides can be derived from any polypeptide known to or suspected to be associated with an infectious disease organism, or peptides derived from any polypeptide known to or have been found to have altered expression in an infected cell in comparison to a normal cell or tissue (e.g., an infectious disease polynucleotide or polypeptide, including infectious disease polynucleotides or polypeptides with expression restricted to a host cell). Suitable polypeptides from which the antigenic peptides can be derived can be found for example in the COSMIC database or the AACR Genomics Evidence Neoplasia Information Exchange (GENIE) database. COSMIC curates comprehensive information on somatic mutations in human cancer. AACR GENIE aggregates and links clinical-grade cancer genomic data with clinical outcomes from tens of thousands of cancer patients. In some aspects the tumor specific mutation is a driver mutation for a particular cancer type.

[0175] Antigenic peptides and polypeptides having a desired activity or property can be modified to provide certain desired attributes, e.g., improved pharmacological characteristics, while increasing or at least retaining substantially all of the biological activity of the unmodified peptide to bind the desired MHC molecule and activate the appropriate T cell. For instance, antigenic peptide and polypeptides can be subject to various changes, such as substitutions, either conservative or non-conservative, where such changes might provide for certain advantages in their use, such as improved MHC binding, stability or presentation. By conservative substitutions is meant replacing an amino acid residue with another which is biologically and/or chemically similar, e.g., one hydrophobic residue for another, or one polar residue for another. The substitutions include combinations such as Gly, Ala; Val, Ile, Leu, Met; Asp, Glu; Asn, Gln; Ser, Thr; Lys, Arg; and Phe, Tyr. The effect of single amino acid substitutions may also be probed using D-amino acids. Such modifications can be made using well known peptide synthesis procedures, as described in e.g., Merrifield, Science 232:341-347 (1986), Barany & Merrifield, The Peptides, Gross & Meienhofer, eds. (N.Y., Academic Press), pp. 1-284 (1979); and Stewart & Young, Solid Phase Peptide Synthesis, (Rockford, Ill., Pierce), 2d Ed. (1984).

[0176] Modifications of peptides and polypeptides with various amino acid mimetics or unnatural amino acids can be particularly useful in increasing the stability of the peptide and polypeptide in vivo. Stability can be assayed in a number of ways. For instance, peptidases and various biological media, such as human plasma and serum, have been used to test stability. See, e.g., Verhoef et al., Eur. J. Drug Metab Pharmacokin. 11:291-302 (1986). Half-life of the peptides can be conveniently determined using a 25% human serum (v/v) assay. The protocol is generally as follows. Pooled human serum (Type AB, non-heat inactivated) is delipidated by centrifugation before use. The serum is then diluted to 25% with RPMI tissue culture media and used to test peptide stability. At predetermined time intervals a small amount of reaction solution is removed and added to either 6% aqueous trichloracetic acid or ethanol. The cloudy reaction sample is cooled (4 degrees C.) for 15 minutes and then spun to pellet the precipitated serum proteins. The presence of the peptides is then determined by reversed-phase HPLC using stability-specific chromatography conditions.

[0177] The peptides and polypeptides can be modified to provide desired attributes other than improved serum half-life. For instance, the ability of the peptides to stimulate CTL activity can be enhanced by linkage to a sequence which contains at least one epitope that is capable of stimulating a T helper cell response. Immunogenic peptides/T helper conjugates can be linked by a spacer molecule. The spacer is typically comprised of relatively small, neutral molecules, such as amino acids or amino acid mimetics, which are substantially uncharged under physiological conditions. The spacers are typically selected from, e.g., Ala, Gly, or other neutral spacers of nonpolar amino acids or neutral polar amino acids. It will be understood that the optionally present spacer need not be comprised of the same residues and thus can be a hetero- or homo-oligomer. When present, the spacer will usually be at least one or two residues, more usually three to six residues. Alternatively, the peptide can be linked to the T helper peptide without a spacer.

[0178] An antigenic peptide can be linked to the T helper peptide either directly or via a spacer either at the amino or carboxy terminus of the peptide. The amino terminus of either the antigenic peptide or the T helper peptide can be acylated. Exemplary T helper peptides include tetanus toxoid 830-843, influenza 307-319, malaria circumsporozoite 382-398 and 378-389.

[0179] Proteins or peptides can be made by any technique known to those of skill in the art, including the expression of proteins, polypeptides or peptides through standard molecular biological techniques, the isolation of proteins or peptides from natural sources, or the chemical synthesis of proteins or peptides. The nucleotide and protein, polypeptide and peptide sequences corresponding to various genes have been previously disclosed, and can be found at computerized databases known to those of ordinary skill in the art. One such database is the National Center for Biotechnology Information's Genbank and GenPept databases located at the National Institutes of Health website. The coding regions for known genes can be amplified and/or expressed using the techniques disclosed herein or as would be known to those of ordinary skill in the art. Alternatively, various commercial preparations of proteins, polypeptides and peptides are known to those of skill in the art.

[0180] In a further aspect an antigen includes a nucleic acid (e.g. polynucleotide) that encodes an antigenic peptide or portion thereof. The polynucleotide can be, e.g., DNA, cDNA, PNA, CNA, RNA (e.g., mRNA), either single- and/or double-stranded, or native or stabilized forms of polynucleotides, such as, e.g., polynucleotides with a phosphorothioate backbone, or combinations thereof and it may or may not contain introns. A polynucleotide sequence encoding an antigen can be sequence-optimized to improve expression, such as through improving transcription, translation, post-transcriptional processing, and/or RNA stability. For example, polynucleotide sequence encoding an antigen can be codon-optimized. “Codon-optimization” herein refers to replacing infrequently used codons, with respect to codon bias of a given organism, with frequently used synonymous codons. Polynucleotide sequences can be optimized to improve post-transcriptional processing, for example optimized to reduce unintended splicing, such as through removal of splicing motifs (e.g., canonical and/or cryptic/non-canonical splice donor, branch, and/or acceptor sequences) and/or introduction of exogenous splicing motifs (e.g., splice donor, branch, and/or acceptor sequences) to bias favored splicing events. Exogenous intron sequences include, but are not limited to, those derived from SV40 (e.g., an SV40 mini-intron) and derived from immunoglobulins (e.g., human β-globin gene). Exogenous intron sequences can be incorporated between a promoter/enhancer sequence and the antigen(s) sequence. Exogenous intron sequences for use in expression vectors are described in more detail in Callendret et al. (Virology. 2007 Jul. 5; 363(2): 288-302), herein incorporated by reference for all purposes. Polynucleotide sequences can be optimized to improve transcript stability, for example through removal of RNA instability motifs (e.g., AU-rich elements and 3′ UTR motifs) and/or repetitive nucleotide sequences. Polynucleotide sequences can be optimized to improve accurate transcription, for example through removal of cryptic transcriptional initiators and/or terminators. Polynucleotide sequences can be optimized to improve translation and translational accuracy, for example through removal of cryptic AUG start codons, premature polyA sequences, and/or secondary structure motifs. Polynucleotide sequences can be optimized to improve nuclear export of transcripts, such as through addition of a Constitutive Transport Element (CTE), RNA Transport Element (RTE), or Woodchuck Posttranscriptional Regulatory Element (WPRE). Nuclear export signals for use in expression vectors are described in more detail in Callendret et al. (Virology. 2007 Jul. 5; 363(2): 288-302), herein incorporated by reference for all purposes. Polynucleotide sequences can be optimized with respect to GC content, for example to reflect the average GC content of a given organism. Sequence optimization can balance one or more sequence properties, such as transcription, translation, post-transcriptional processing, and/or RNA stability. Sequence optimization can generate an optimal sequence balancing each of transcription, translation, post-transcriptional processing, and RNA stability. Sequence optimization algorithms are known to those of skill in the art, such as GeneArt (Thermo Fisher), Codon Optimization Tool (IDT), Cool Tool (University of Singapore), SGI-DNA (La Jolla California). One or more regions of an antigen-encoding protein can be sequence-optimized separately.

[0181] A still further aspect provides an expression vector capable of expressing a polypeptide or portion thereof. Expression vectors for different cell types are well known in the art and can be selected without undue experimentation. Generally, DNA is inserted into an expression vector, such as a plasmid, in proper orientation and correct reading frame for expression. If necessary, DNA can be linked to the appropriate transcriptional and translational regulatory control nucleotide sequences recognized by the desired host, although such controls are generally available in the expression vector. The vector is then introduced into the host through standard techniques. Guidance can be found e.g. in Sambrook et al. (1989) Molecular Cloning, A Laboratory Manual, Cold Spring Harbor Laboratory, Cold Spring Harbor, N.Y.

### V. Vaccine Compositions

[0182] Also disclosed herein is an immunogenic composition, e.g., a vaccine composition, capable of raising a specific immune response, e.g., a tumor-specific immune response. Vaccine compositions typically comprise one or a plurality of antigens, e.g., selected using a method described herein or as set forth in Table A, Table 1.2, or AACR GENIE Results. Vaccine compositions can also be referred to as vaccines.

[0183] A vaccine can contain between 1 and 30 peptides, 2, 3, 4, 5, 6, 7, 8, 9, 10, 11, 12, 13, 14, 15, 16, 17, 18, 19, 20, 21, 22, 23, 24, 25, 26, 27, 28, 29, or 30 different peptides, 6, 7, 8, 9, 10 11, 12, 13, or 14 different peptides, or 12, 13 or 14 different peptides. Peptides can include post-translational modifications. A vaccine can contain between 1 and 100 or more nucleotide sequences, 2, 3, 4, 5, 6, 7, 8, 9, 10, 11, 12, 13, 14, 15, 16, 17, 18, 19, 20, 21, 22, 23, 24, 25, 26, 27, 28, 29, 30, 31, 32, 33, 34, 35, 36, 37, 38, 39, 40, 41, 42, 43, 44, 45, 46, 47, 48, 49, 50, 51, 52, 53, 54, 55, 56, 57, 58, 59, 60, 61, 62, 63, 64, 65, 66, 67, 68, 69, 70, 71, 72, 73, 74, 75, 76, 77, 78, 79, 80, 81, 82, 83, 84, 85, 86, 87, 88, 89, 90, 91, 92, 93, 94, 95, 96, 97, 98, 99, 100 or more different nucleotide sequences, 6, 7, 8, 9, 10 11, 12, 13, or 14 different nucleotide sequences, or 12, 13 or 14 different nucleotide sequences. A vaccine can contain between 1 and 30 antigen sequences, 2, 3, 4, 5, 6, 7, 8, 9, 10, 11, 12, 13, 14, 15, 16, 17, 18, 19, 20, 21, 22, 23, 24, 25, 26, 27, 28, 29, 30, 31, 32, 33, 34, 35, 36, 37, 38, 39, 40, 41, 42, 43, 44, 45, 46, 47, 48, 49, 50, 51, 52, 53, 54, 55, 56, 57, 58, 59, 60, 61, 62, 63, 64, 65, 66, 67, 68, 69, 70, 71, 72, 73, 74, 75, 76, 77, 78, 79, 80, 81, 82, 83, 84, 85, 86, 87, 88, 89, 90, 91, 92, 93, 94, 95, 96, 97, 98, 99, 100 or more different antigen sequences, 6, 7, 8, 9, 10 11, 12, 13, or 14 different antigen sequences, or 12, 13 or 14 different antigen sequences.

[0184] A vaccine can contain between 1 and 30 antigen-encoding nucleic acid sequences, 2, 3, 4, 5, 6, 7, 8, 9, 10, 11, 12, 13, 14, 15, 16, 17, 18, 19, 20, 21, 22, 23, 24, 25, 26, 27, 28, 29, 30, 31, 32, 33, 34, 35, 36, 37, 38, 39, 40, 41, 42, 43, 44, 45, 46, 47, 48, 49, 50, 51, 52, 53, 54, 55, 56, 57, 58, 59, 60, 61, 62, 63, 64, 65, 66, 67, 68, 69, 70, 71, 72, 73, 74, 75, 76, 77, 78, 79, 80, 81, 82, 83, 84, 85, 86, 87, 88, 89, 90, 91, 92, 93, 94, 95, 96, 97, 98, 99, 100 or more different antigen-encoding nucleic acid sequences, 6, 7, 8, 9, 10 11, 12, 13, or 14 different antigen-encoding nucleic acid sequences, or 12, 13 or 14 different antigen-encoding nucleic acid sequences. Antigen-encoding nucleic acid sequences can refer to the antigen encoding portion of an “antigen cassette.” Features of an antigen cassette are described in greater detail herein. An antigen-encoding nucleic acid sequence can contain one or more epitope-encoding nucleic acid sequences (e.g., an antigen-encoding nucleic acid sequence encoding concatenated T cell epitopes).

[0185] A vaccine can contain between 1 and 30 distinct epitope-encoding nucleic acid sequences, 2, 3, 4, 5, 6, 7, 8, 9, 10, 11, 12, 13, 14, 15, 16, 17, 18, 19, 20, 21, 22, 23, 24, 25, 26, 27, 28, 29, 30, 31, 32, 33, 34, 35, 36, 37, 38, 39, 40, 41, 42, 43, 44, 45, 46, 47, 48, 49, 50, 51, 52, 53, 54, 55, 56, 57, 58, 59, 60, 61, 62, 63, 64, 65, 66, 67, 68, 69, 70, 71, 72, 73, 74, 75, 76, 77, 78, 79, 80, 81, 82, 83, 84, 85, 86, 87, 88, 89, 90, 91, 92, 93, 94, 95, 96, 97, 98, 99, 100 or more distinct epitope-encoding nucleic acid sequences, 6, 7, 8, 9, 10 11, 12, 13, or 14 distinct epitope-encoding nucleic acid sequences, or 12, 13 or 14 distinct epitope-encoding nucleic acid sequences. Epitope-encoding nucleic acid sequences can refer to sequences for individual epitope sequences, such as each of the T cell epitopes in an antigen-encoding nucleic acid sequence encoding concatenated T cell epitopes.

[0186] A vaccine can contain at least two iterations of an epitope-encoding nucleic acid sequence. A used herein, an “iteration” (or interchangeably a “repeat”) refers to two or more identical nucleic acid epitope-encoding nucleic acid sequences (inclusive of the optional 5′ linker sequence and/or the optional 3′ linker sequences described herein) within an antigen-encoding nucleic acid sequence. In one example, the antigen-encoding nucleic acid sequence portion of a cassette encodes at least two iterations of an epitope-encoding nucleic acid sequence. In further non-limiting examples, the antigen-encoding nucleic acid sequence portion of a cassette encodes more than one distinct epitope, and at least one of the distinct epitopes is encoded by at least two iterations of the nucleic acid sequence encoding the distinct epitope (i.e., at least two distinct epitope-encoding nucleic acid sequences). In illustrative non-limiting examples, an antigen-encoding nucleic acid sequence encodes epitopes A, B, and C encoded by epitope-encoding nucleic acid sequences epitope-encoding sequence A (E_{A}), epitope-encoding sequence B (E_{B}), and epitope-encoding sequence C (E_{C}), and exemplary antigen-encoding nucleic acid sequences having iterations of at least one of the distinct epitopes are illustrated by, but is not limited to, the formulas below:
[0187] Iteration of one distinct epitope (iteration of epitope A):

[chemical structure]

[0188] Iteration of multiple distinct epitopes (iterations of epitopes A, B, and C):

[chemical structure]

[0189] Multiple iterations of multiple distinct epitopes (iterations of epitopes A, B, and C):

[chemical structure]

[0190] The above examples are not limiting and the antigen-encoding nucleic acid sequences having iterations of at least one of the distinct epitopes can encode each of the distinct epitopes in any order or frequency. For example, the order and frequency can be a random arrangement of the distinct epitopes, e.g., in an example with epitopes A, B, and C, by the formula E_{A}-E_{B}-E_{C}-E_{C}-E_{A}-E_{B}-E_{A}-E_{C}-E_{A}-E_{C}-E_{C}-E_{B}.

[0191] Also provided for herein is an antigen-encoding cassette, the antigen-encoding cassette having at least one antigen-encoding nucleic acid sequence described, from 5′ to 3′, by the formula:

[chemical structure]

where E represents a nucleotide sequence including a distinct epitope-encoding nucleic acid sequences,
n represents the number of separate distinct epitope-encoding nucleic acid sequences and is any integer including 0,
E^{N} represents a nucleotide sequence comprising the separate distinct epitope-encoding nucleic acid sequence for each corresponding n,
for each iteration of z: x=0 or 1, y=0 or 1 for each n, and at least one of x or y=1, and z=2 or greater, wherein the antigen-encoding nucleic acid sequence comprises at least two iterations of E, a given E^{N}, or a combination thereof.

[0192] Each E or E^{N} can independently comprise any epitope-encoding nucleic acid sequence described herein (e.g., a peptide encoding an infectious disease T cell epitope and/or a neoantigen epitope). For example, Each E or E^{N} can independently comprises a nucleotide sequence described, from 5′ to 3′, by the formula (L5_{b}-N_{c}-L3_{d}), where N comprises the distinct epitope-encoding nucleic acid sequence associated with each E or E^{N}, where c=1, L5 comprises a 5′ linker sequence, where b=0 or 1, and L3 comprises a 3′ linker sequence, where d=0 or 1. Epitopes and linkers that can be used are further described herein.

[0193] Iterations of an epitope-encoding nucleic acid sequences (inclusive of optional 5′ linker sequence and/or the optional 3′ linker sequences) can be linearly linked directly to one another (e.g., E_{A}-E_{A}- . . . as illustrated above). Iterations of an epitope-encoding nucleic acid sequences can be separated by one or more additional nucleotides sequences. In general, iterations of an epitope-encoding nucleic acid sequences can be separated by any size nucleotide sequence applicable for the compositions described herein. In one example, iterations of an epitope-encoding nucleic acid sequences can be separated by a separate distinct epitope-encoding nucleic acid sequence (e.g., E_{A}-E_{B}-E_{C}-E_{A} . . . , as illustrated above). In examples where iterations are separated by a single separate distinct epitope-encoding nucleic acid sequence, and each epitope-encoding nucleic acid sequences (inclusive of optional 5′ linker sequence and/or the optional 3′ linker sequences) encodes a peptide 25 amino acids in length, the iterations can be separated by 75 nucleotides, such as in antigen-encoding nucleic acid represented by E_{A}-E_{B}-E_{A} . . . , E_{A} is separated by 75 nucleotides. In an illustrative example, an antigen-encoding nucleic acid having the sequence

(SEQ ID NO: 85)
VTNTEMFVTAPDNLGYMYEVQWPGQTQPQIANCSVYDFFVWLHYYSV
RDTVTNTEMFVTAPDNLGYMYEVQWPGQTQPQIANCSVYDFFVWLHY
YSVRDT

encoding iterations of 25mer antigens Trp1 (VTNTEMFVTAPDNLGYMYEVQWPGQ [SEQ ID NO:86]) and Trp2 (TQPQIANCSVYDFFVWLHYYSVRDT [SEQ ID NO:87]), the iterations of Trp1 are separated by the 25mer Trp2 and thus the repeats of the Trp1 epitope-encoding nucleic acid sequences are separated the 75 nucleotide Trp2 epitope-encoding nucleic acid sequence. In examples where iterations are separated by 2, 3, 4, 5, 6, 7, 8, or 9 separate distinct epitope-encoding nucleic acid sequence, and each epitope-encoding nucleic acid sequences (inclusive of optional 5′ linker sequence and/or the optional 3′ linker sequences) encodes a peptide 25 amino acids in length, the iterations can be separated by 150, 225, 300, 375, 450, 525, 600, or 675 nucleotides, respectively.

[0194] In some instances, an antigen or epitope in a cassette encoding additional antigens and/or epitopes may be an immunodominant epitope relative to the others encoded. Immunodominance, in general, is the skewing of an immune response towards only one or a few specific immunogenic peptides. Immunodominance can be assessed as part of an immune monitoring protocol. For example, immunodominance can be assessed through evaluating T cell and/or B cell responses to the encoded antigens.

[0195] In some instances, it may be desired to avoid vaccine compositions containing immunodominant epitope. For example, it may be desired to avoid designing a vaccine cassette encoding an immunodominant epitope. Without wishing to be bound by theory, administering and/or encoding an immunodominant epitope together with additional epitope may reduce the immune response to the additional epitopes, including potentially ultimately reducing vaccine efficacy against the additional epitopes. As an illustrative non-limiting example, vaccine compositions including TP53-associated neoepitopes may have the immune response, e.g., a T cell response, skewed towards the TP53-associated neoepitope negatively impacting the immune response to other antigens or epitopes in the vaccine composition.

[0196] In one embodiment, different peptides and/or polypeptides or nucleotide sequences encoding them are selected so that the peptides and/or polypeptides capable of associating with different MHC molecules, such as different MHC class I molecules and/or different MHC class II molecules. In some aspects, one vaccine composition comprises coding sequence for peptides and/or polypeptides capable of associating with the most frequently occurring MHC class I molecules and/or different MHC class II molecules. Hence, vaccine compositions can comprise different fragments capable of associating with at least 2 preferred, at least 3 preferred, or at least 4 preferred MHC class I molecules and/or different MHC class II molecules.

[0197] The vaccine composition can be capable of stimulating a specific cytotoxic T-cell response and/or a specific helper T-cell response. The vaccine composition can be capable of stimulating a specific cytotoxic T-cell response and a specific helper T-cell response.

[0198] The vaccine composition can be capable of stimulating a specific B-cell response (e.g., an antibody response).

[0199] The vaccine composition can be capable of stimulating a specific cytotoxic T-cell response, a specific helper T-cell response, and/or a specific B-cell response. The vaccine composition can be capable of stimulating a specific cytotoxic T-cell response and a specific B-cell response. The vaccine composition can be capable of stimulating a specific helper T-cell response and a specific B-cell response. The vaccine composition can be capable of stimulating a specific cytotoxic T-cell response, a specific helper T-cell response, and a specific B-cell response.

[0200] A vaccine composition can further comprise an adjuvant and/or a carrier. Examples of useful adjuvants and carriers are given herein below. A composition can be associated with a carrier such as e.g. a protein or an antigen-presenting cell such as e.g. a dendritic cell (DC) capable of presenting the peptide to a T-cell.

[0201] Adjuvants are any substance whose admixture into a vaccine composition increases or otherwise modifies the immune response to an antigen. Carriers can be scaffold structures, for example a polypeptide or a polysaccharide, to which an antigen, is capable of being associated. Optionally, adjuvants are conjugated covalently or non-covalently.

[0202] The ability of an adjuvant to increase an immune response to an antigen is typically manifested by a significant or substantial increase in an immune-mediated reaction, or reduction in disease symptoms. For example, an increase in humoral immunity is typically manifested by a significant increase in the titer of antibodies raised to the antigen, and an increase in T-cell activity is typically manifested in increased cell proliferation, or cellular cytotoxicity, or cytokine secretion. An adjuvant may also alter an immune response, for example, by changing a primarily humoral or Th response into a primarily cellular, or Th response.

[0203] Suitable adjuvants include, but are not limited to 1018 ISS, alum, aluminum salts, Amplivax, AS15, BCG, CP-870,893, CpG7909, CyaA, dSLIM, GM-CSF, IC30, IC31, Imiquimod, ImuFact IMP321, IS Patch, ISS, ISCOMATRIX, Juvlmmune, LipoVac, MF59, monophosphoryl lipid A, Montanide IMS 1312, Montanide ISA 206, Montanide ISA 50V, Montanide ISA-51, OK-432, OM-174, OM-197-MP-EC, ONTAK, PepTel vector system, PLG microparticles, resiquimod, SRL172, Virosomes and other Virus-like particles, YF-17D, VEGF trap, R848, beta-glucan, Pam3Cys, Aquila's QS21 stimulon (Aquila Biotech, Worcester, Mass., USA) which is derived from saponin, mycobacterial extracts and synthetic bacterial cell wall mimics, and other proprietary adjuvants such as Ribi's Detox. Quil or Superfos. Adjuvants such as incomplete Freund's or GM-CSF are useful. Several immunological adjuvants (e.g., MF59) specific for dendritic cells and their preparation have been described previously (Dupuis M, et al., Cell Immunol. 1998; 186(1):18-27; Allison A C; Dev Biol Stand. 1998; 92:3-11). Also cytokines can be used. Several cytokines have been directly linked to influencing dendritic cell migration to lymphoid tissues (e.g., TNF-alpha), accelerating the maturation of dendritic cells into efficient antigen-presenting cells for T-lymphocytes (e.g., GM-CSF, IL-1 and IL-4) (U.S. Pat. No. 5,849,589, specifically incorporated herein by reference in its entirety) and acting as immunoadjuvants (e.g., IL-12) (Gabrilovich D I, et al., J Immunother Emphasis Tumor Immunol. 1996 (6):414-418).

[0204] CpG immunostimulatory oligonucleotides have also been reported to enhance the effects of adjuvants in a vaccine setting. Other TLR binding molecules such as RNA binding TLR 7, TLR 8 and/or TLR 9 may also be used.

[0205] Other examples of useful adjuvants include, but are not limited to, chemically modified CpGs (e.g. CpR, Idera), Poly(I:C)(e.g. polyi:CI2U), non-CpG bacterial DNA or RNA as well as immunoactive small molecules and antibodies such as cyclophosphamide, sunitinib, bevacizumab, celebrex, NCX-4016, sildenafil, tadalafil, vardenafil, sorafinib, XL-999, CP-547632, pazopanib, ZD2171, AZD2171, ipilimumab, tremelimumab, and SC58175, which may act therapeutically and/or as an adjuvant. The amounts and concentrations of adjuvants and additives can readily be determined by the skilled artisan without undue experimentation. Additional adjuvants include colony-stimulating factors, such as Granulocyte Macrophage Colony Stimulating Factor (GM-CSF, sargramostim).

[0206] A vaccine composition can comprise more than one different adjuvant. Furthermore, a therapeutic composition can comprise any adjuvant substance including any of the above or combinations thereof. It is also contemplated that a vaccine and an adjuvant can be administered together or separately in any appropriate sequence.

[0207] A carrier (or excipient) can be present independently of an adjuvant. The function of a carrier can for example be to increase the molecular weight of in particular mutant to increase activity or immunogenicity, to confer stability, to increase the biological activity, or to increase serum half-life. Furthermore, a carrier can aid presenting peptides to T-cells. A carrier can be any suitable carrier known to the person skilled in the art, for example a protein or an antigen presenting cell. A carrier protein could be but is not limited to keyhole limpet hemocyanin, serum proteins such as transferrin, bovine serum albumin, human serum albumin, thyroglobulin or ovalbumin, immunoglobulins, or hormones, such as insulin or palmitic acid. For immunization of humans, the carrier is generally a physiologically acceptable carrier acceptable to humans and safe. However, tetanus toxoid and/or diphtheria toxoid are suitable carriers. Alternatively, the carrier can be dextrans for example sepharose.

[0208] Cytotoxic T-cells (CTLs) recognize an antigen in the form of a peptide bound to an MHC molecule rather than the intact foreign antigen itself. The MHC molecule itself is located at the cell surface of an antigen presenting cell. Thus, an activation of CTLs is possible if a trimeric complex of peptide antigen, MHC molecule, and APC is present. Correspondingly, it may enhance the immune response if not only the peptide is used for activation of CTLs, but if additionally APCs with the respective MHC molecule are added. Therefore, in some embodiments a vaccine composition additionally contains at least one antigen presenting cell.

[0209] Antigens can also be included in viral vector-based vaccine platforms, such as vaccinia, fowlpox, self-replicating alphavirus, marabavirus, adenovirus (See, e.g., Tatsis et al., Adenoviruses, Molecular Therapy (2004) 10, 616-629), or lentivirus, including but not limited to second, third or hybrid second/third generation lentivirus and recombinant lentivirus of any generation designed to target specific cell types or receptors (See, e.g., Hu et al., Immunization Delivered by Lentiviral Vectors for Cancer and Infectious Diseases, Immunol Rev. (2011) 239(1): 45-61, Sakuma et al., Lentiviral vectors: basic to translational, Biochem J. (2012) 443(3):603-18, Cooper et al., Rescue of splicing-mediated intron loss maximizes expression in lentiviral vectors containing the human ubiquitin C promoter, Nucl. Acids Res. (2015) 43 (1): 682-690, Zufferey et al., Self-Inactivating Lentivirus Vector for Safe and Efficient In Vivo Gene Delivery, J. Virol. (1998) 72 (12): 9873-9880). Dependent on the packaging capacity of the above mentioned viral vector-based vaccine platforms, this approach can deliver one or more nucleotide sequences that encode one or more antigen peptides. The sequences may be flanked by non-mutated sequences, may be separated by linkers or may be preceded with one or more sequences targeting a subcellular compartment (See, e.g., Gros et al., Prospective identification of neoantigen-specific lymphocytes in the peripheral blood of melanoma patients, Nat Med. (2016) 22 (4):433-8, Stronen et al., Targeting of cancer neoantigens with donor-derived T cell receptor repertoires, Science. (2016) 352 (6291):1337-41, Lu et al., Efficient identification of mutated cancer antigens recognized by T cells associated with durable tumor regressions, Clin Cancer Res. (2014) 20(13):3401-10). Upon introduction into a host, infected cells express the antigens, and thereby stimulate a host immune (e.g., CTL) response against the peptide(s). Vaccinia vectors and methods useful in immunization protocols are described in, e.g., U.S. Pat. No. 4,722,848. Another vector is BCG (Bacille Calmette Guerin). BCG vectors are described in Stover et al. (Nature 351:456-460 (1991)). A wide variety of other vaccine vectors useful for therapeutic administration or immunization of antigens, e.g., Salmonella typhi vectors, and the like will be apparent to those skilled in the art from the description herein.

### V.A. Antigen Cassette

[0210] The methods employed for the selection of one or more antigens, the cloning and construction of an “antigen cassette” and its insertion into a viral vector are within the skill in the art given the teachings provided herein. By “antigen cassette” or “cassette” is meant the combination of a selected antigen or plurality of antigens (e.g., antigen-encoding nucleic acid sequences) and the other regulatory elements necessary to transcribe the antigen(s) and express the transcribed product. The selected antigen or plurality of antigens can refer to distinct epitope sequences, e.g., an antigen-encoding nucleic acid sequence in the cassette can encode an epitope-encoding nucleic acid sequence (or plurality of epitope-encoding nucleic acid sequences) such that the epitopes are transcribed and expressed. An antigen or plurality of antigens can be operatively linked to regulatory components in a manner which permits transcription. Such components include conventional regulatory elements that can drive expression of the antigen(s) in a cell transfected with the viral vector. Thus the antigen cassette can also contain a selected promoter which is linked to the antigen(s) and located, with other, optional regulatory elements, within the selected viral sequences of the recombinant vector. Cassettes can include one or more neoantigens shown in Table A and/or AACR GENIE Results, and/or one or more antigens shown in Table 1.2.

[0211] A cassette can have one or more antigen-encoding nucleic acid sequences, such as a cassette containing multiple antigen-encoding nucleic acid sequences each independently operably linked to separate promoters and/or linked together using other multicistonic systems, such as 2A ribosome skipping sequence elements (e.g., E2A, P2A, F2A, or T2A sequences) or Internal Ribosome Entry Site (IRES) sequence elements. A linker can also have a cleavage site, such as a TEV or furin cleavage site. Linkers with cleavage sites can be used in combination with other elements, such as those in a multicistronic system. In a non-limiting illustrative example, a furin protease cleavage site can be used in conjuction with a 2A ribosome skipping sequence element such that the furin protease cleavage site is configured to facilitate removal of the 2A sequence following translation. In a cassette containing more than one antigen-encoding nucleic acid sequences, each antigen-encoding nucleic acid sequence can contain one or more epitope-encoding nucleic acid sequences (e.g., an antigen-encoding nucleic acid sequence encoding concatenated T cell epitopes).

[0212] Useful promoters can be constitutive promoters or regulated (inducible) promoters, which will enable control of the amount of antigen(s) to be expressed. For example, a desirable promoter is that of the cytomegalovirus immediate early promoter/enhancer [see, e.g., Boshart et al, Cell, 41:521-530 (1985)]. Another desirable promoter includes the Rous sarcoma virus LTR promoter/enhancer. Still another promoter/enhancer sequence is the chicken cytoplasmic beta-actin promoter [T. A. Kost et al, Nucl. Acids Res., 11(23):8287 (1983)]. Other suitable or desirable promoters can be selected by one of skill in the art.

[0213] The antigen cassette can also include nucleic acid sequences heterologous to the viral vector sequences including sequences providing signals for efficient polyadenylation of the transcript (poly(A), poly-A or pA) and introns with functional splice donor and acceptor sites. A common poly-A sequence which is employed in the exemplary vectors of this invention is that derived from the papovavirus SV-40. The poly-A sequence generally can be inserted in the cassette following the antigen-based sequences and before the viral vector sequences. A common intron sequence can also be derived from SV-40, and is referred to as the SV-40 T intron sequence. An antigen cassette can also contain such an intron, located between the promoter/enhancer sequence and the antigen(s). Selection of these and other common vector elements are conventional [see, e.g., Sambrook et al, “Molecular Cloning. A Laboratory Manual.”, 2d edit., Cold Spring Harbor Laboratory, New York (1989) and references cited therein] and many such sequences are available from commercial and industrial sources as well as from Genbank.

[0214] An antigen cassette can have one or more antigens. For example, a given cassette can include 1-10, 1-20, 1-30, 10-20, 15-25, 15-20, 1, 2, 3, 4, 5, 6, 7, 8, 9, 10, 11, 12, 13, 14, 15, 16, 17, 18, 19, 20, or more antigens. Antigens can be linked directly to one another. Antigens can also be linked to one another with linkers. Antigens can be in any orientation relative to one another including N to C or C to N.

[0215] As described elsewhere herein, the antigen cassette can be located in the site of any selected deletion in a viral vector, such as the deleted structural proteins of a VEE backbone or the site of the E1 gene region deletion or E3 gene region deletion of a ChAd-based vector, among others which may be selected.

[0216] The antigen cassette can be described using the following formula to describe the ordered sequence of each element, from 5′ to 3′:

[chemical structure]

[0217] wherein P and P2 comprise promoter nucleotide sequences, N comprises an MHC class I epitope encoding nucleic acid sequence, L5 comprises a 5′ linker sequence, L3 comprises a 3′ linker sequence, G5 comprises a nucleic acid sequences encoding an amino acid linker, G3 comprises one of the at least one nucleic acid sequences encoding an amino acid linker, U comprises an MHC class II antigen-encoding nucleic acid sequence, where for each X the corresponding Nc is an epitope encoding nucleic acid sequence, where for each Y the corresponding Uf is a MHC class II epitope-encoding nucleic acid sequence (e.g., universal MHC class II epitope-encoding nucleic acid sequence). A universal sequence can comprise at least one of Tetanus toxoid and PADRE. A universal sequence can comprise a Tetanus toxoid peptide. A universal sequence can comprise a PADRE peptide. A universal sequence can comprise a Tetanus toxoid and PADRE peptides. The composition and ordered sequence can be further defined by selecting the number of elements present, for example where a=0 or 1, where b=0 or 1, where c=1, where d=0 or 1, where e=0 or 1, where f=1, where g=0 or 1, where h=0 or 1, X=1 to 400, Y=0, 1, 2, 3, 4 or 5, Z=1 to 400, and W=0, 1, 2, 3, 4 or 5.

[0218] In one example, elements present include where a=0, b=1, d=1, e=1, g=1, h=0, X=10, Y=2, Z=1, and W=1, describing where no additional promoter is present (e.g. only the promoter nucleotide sequence provided by a vector backbone, such as an RNA alphavirus backbone is present), 10 MHC class I epitopes are present, a 5′ linker is present for each N, a 3′ linker is present for each N, 2 MHC class II epitopes are present, a linker is present linking the two MHC class II epitopes, a linker is present linking the 5′ end of the two MHC class II epitopes to the 3′ linker of the final MHC class I epitope, and a linker is present linking the 3′ end of the two MHC class II epitopes to the to a vector backbone (e.g., an RNA alphavirus backbone). Examples of linking the 3′ end of the antigen cassette to a vector backbone (e.g., an RNA alphavirus backbone) include linking directly to the 3′ UTR elements provided by the vector backbone, such as a 3′ 19-nt CSE. Examples of linking the 5′ end of the antigen cassette to a vector backbone (e.g., an RNA alphavirus backbone) include linking directly to a promoter or 5′ UTR element of the vector backbone, such as a subgenomic promoter sequence (e.g., a 26S subgenomic promoter sequence), an alphavirus 5′ UTR, a 51-nt CSE, or a 24-nt CSE.

[0219] Other examples include: where a=1 describing where a promoter other than the promoter nucleotide sequence provided by a vector backbone (e.g., an RNA alphavirus backbone) is present; where a=1 and Z is greater than 1 where multiple promoters other than the promoter nucleotide sequence provided by the vector backbone are present each driving expression of 1 or more distinct MHC class I epitope encoding nucleic acid sequences; where h=1 describing where a separate promoter is present to drive expression of the MHC class II epitope-encoding nucleic acid sequences; and where g=0 describing the MHC class II epitope-encoding nucleic acid sequence, if present, is directly linked to a vector backbone (e.g., an RNA alphavirus backbone).

[0220] Other examples include where each MHC class I epitope that is present can have a 5′ linker, a 3′ linker, neither, or both. In examples where more than one MHC class I epitope is present in the same antigen cassette, some MHC class I epitopes may have both a 5′ linker and a 3′ linker, while other MHC class I epitopes may have either a 5′ linker, a 3′ linker, or neither. In other examples where more than one MHC class I epitope is present in the same antigen cassette, some MHC class I epitopes may have either a 5′ linker or a 3′ linker, while other MHC class I epitopes may have either a 5′ linker, a 3′ linker, or neither.

[0221] In examples where more than one MHC class II epitope is present in the same antigen cassette, some MHC class II epitopes may have both a 5′ linker and a 3′ linker, while other MHC class II epitopes may have either a 5′ linker, a 3′ linker, or neither. In other examples where more than one MHC class II epitope is present in the same antigen cassette, some MHC class II epitopes may have either a 5′ linker or a 3′ linker, while other MHC class II epitopes may have either a 5′ linker, a 3′ linker, or neither.

[0222] Other examples include where each antigen that is present can have a 5′ linker, a 3′ linker, neither, or both. In examples where more than one antigen is present in the same antigen cassette, some antigens may have both a 5′ linker and a 3′ linker, while other antigens may have either a 5′ linker, a 3′ linker, or neither. In other examples where more than one antigen is present in the same antigen cassette, some antigens may have either a 5′ linker or a 3′ linker, while other antigens may have either a 5′ linker, a 3′ linker, or neither.

[0223] The promoter nucleotide sequences P and/or P2 can be the same as a promoter nucleotide sequence provided by a vector backbone, such as an RNA alphavirus backbone. For example, the promoter sequence provided by the vector backbone, Pn and P2, can each comprise a subgenomic promoter sequence (e.g., a 26S subgenomic promoter sequence) or a CMV promoter. The promoter nucleotide sequences P and/or P2 can be different from the promoter nucleotide sequence provided by a vector backbone (e.g., an RNA alphavirus backbone), as well as can be different from each other.

[0224] The 5′ linker L5 can be a native sequence or a non-natural sequence. Non-natural sequence include, but are not limited to, AAY, RR, and DPP. The 3′ linker L3 can also be a native sequence or a non-natural sequence. Additionally, L5 and L3 can both be native sequences, both be non-natural sequences, or one can be native and the other non-natural. For each X, the amino acid linkers can be 2, 3, 4, 5, 6, 7, 8, 9, 10, 11, 12, 13, 14, 15, 16, 17, 18, 19, 20, 21, 22, 23, 24, 25, 26, 27, 28, 29, 30, 31, 32, 33, 34, 35, 36, 37, 38, 39, 40, 41, 42, 43, 44, 45, 46, 47, 48, 49, 50, 51, 52, 53, 54, 55, 56, 57, 58, 59, 60, 61, 62, 63, 64, 65, 66, 67, 68, 69, 70, 71, 72, 73, 74, 75, 76, 77, 78, 79, 80, 81, 82, 83, 84, 85, 86, 87, 88, 89, 90, 91, 92, 93, 94, 95, 96, 97, 98, 99, 100 or more amino acids in length. For each X, the amino acid linkers can be also be at least 3, at least 4, at least 5, at least 6, at least 7, at least 8, at least 9, at least 10, at least 11, at least 12, at least 13, at least 14, at least 15, at least 16, at least 17, at least 18, at least 19, at least 20, at least 21, at least 22, at least 23, at least 24, at least 25, at least 26, at least 27, at least 28, at least 29, or at least 30 amino acids in length.

[0225] The amino acid linker G5, for each Y, can be 2, 3, 4, 5, 6, 7, 8, 9, 10, 11, 12, 13, 14, 15, 16, 17, 18, 19, 20, 21, 22, 23, 24, 25, 26, 27, 28, 29, 30, 31, 32, 33, 34, 35, 36, 37, 38, 39, 40, 41, 42, 43, 44, 45, 46, 47, 48, 49, 50, 51, 52, 53, 54, 55, 56, 57, 58, 59, 60, 61, 62, 63, 64, 65, 66, 67, 68, 69, 70, 71, 72, 73, 74, 75, 76, 77, 78, 79, 80, 81, 82, 83, 84, 85, 86, 87, 88, 89, 90, 91, 92, 93, 94, 95, 96, 97, 98, 99, 100 or more amino acids in length. For each Y, the amino acid linkers can be also be at least 3, at least 4, at least 5, at least 6, at least 7, at least 8, at least 9, at least 10, at least 11, at least 12, at least 13, at least 14, at least 15, at least 16, at least 17, at least 18, at least 19, at least 20, at least 21, at least 22, at least 23, at least 24, at least 25, at least 26, at least 27, at least 28, at least 29, or at least 30 amino acids in length.

[0226] The amino acid linker G3 can be 2, 3, 4, 5, 6, 7, 8, 9, 10, 11, 12, 13, 14, 15, 16, 17, 18, 19, 20, 21, 22, 23, 24, 25, 26, 27, 28, 29, 30, 31, 32, 33, 34, 35, 36, 37, 38, 39, 40, 41, 42, 43, 44, 45, 46, 47, 48, 49, 50, 51, 52, 53, 54, 55, 56, 57, 58, 59, 60, 61, 62, 63, 64, 65, 66, 67, 68, 69, 70, 71, 72, 73, 74, 75, 76, 77, 78, 79, 80, 81, 82, 83, 84, 85, 86, 87, 88, 89, 90, 91, 92, 93, 94, 95, 96, 97, 98, 99, 100 or more amino acids in length. G3 can be also be at least 3, at least 4, at least 5, at least 6, at least 7, at least 8, at least 9, at least 10, at least 11, at least 12, at least 13, at least 14, at least 15, at least 16, at least 17, at least 18, at least 19, at least 20, at least 21, at least 22, at least 23, at least 24, at least 25, at least 26, at least 27, at least 28, at least 29, or at least 30 amino acids in length.

[0227] For each X, each N can encode a MHC class I epitope, a MHC class II epitope, an epitope/antigen capable of stimulating a B cell response, or a combination thereof. For each X, each N can encode a combination of a MHC class I epitope, a MHC class II epitope, and an epitope/antigen capable of stimulating a B cell response. For each X, each N can encode a combination of a MHC class I epitope and a MHC class II epitope. For each X, each N can encode a combination of a MHC class I epitope and an epitope/antigen capable of stimulating a B cell response. For each X, each N can encode a combination of a MHC class II epitope and an epitope/antigen capable of stimulating a B cell response. For each X, each N can encode a MHC class II epitope. For each X, each N can encode an epitope/antigen capable of stimulating a B cell response. For each X, each N can encode a MHC class I epitope 7-15 amino acids in length. For each X, each N can also encodes a MHC class I epitope 5, 6, 7, 8, 9, 10, 11, 12, 13, 14, 15, 16, 17, 18, 19, 20, 21, 22, 23, 24, 25, 26, 27, 28, 29, or 30 amino acids in length. For each X, each N can also encodes a MHC class I epitope at least 5, at least 6, at least 7, at least 8, at least 9, at least 10, at least 11, at least 12, at least 13, at least 14, at least 15, at least 16, at least 17, at least 18, at least 19, at least 20, at least 21, at least 22, at least 23, at least 24, at least 25, at least 26, at least 27, at least 28, at least 29, or at least 30 amino acids in length.

[0228] The cassette encoding the one or more antigens can be 700 nucleotides or less. The cassette encoding the one or more antigens can be 700 nucleotides or less and encode 2 distinct epitope-encoding nucleic acid sequences (e.g., encode 2 distinct infectious disease or tumor derived nucleic acid sequences encoding an immunogenic polypeptide). The cassette encoding the one or more antigens can be 700 nucleotides or less and encode at least 2 distinct epitope-encoding nucleic acid sequences. The cassette encoding the one or more antigens can be 700 nucleotides or less and encode 3 distinct epitope-encoding nucleic acid sequences. The cassette encoding the one or more antigens can be 700 nucleotides or less and encode at least 3 distinct epitope-encoding nucleic acid sequences. The cassette encoding the one or more antigens can be 700 nucleotides or less and include 1-10, 1-5, 1, 2, 3, 4, 5, 6, 7, 8, 9, 10, or more antigens.

[0229] The cassette encoding the one or more antigens can be between 375-700 nucleotides in length. The cassette encoding the one or more antigens can be between 375-700 nucleotides in length and encode 2 distinct epitope-encoding nucleic acid sequences (e.g., encode 2 distinct infectious disease or tumor derived nucleic acid sequences encoding an immunogenic polypeptide). The cassette encoding the one or more antigens can be between 375-700 nucleotides in length and encode at least 2 distinct epitope-encoding nucleic acid sequences. The cassette encoding the one or more antigens can be between 375-700 nucleotides in length and encode 3 distinct epitope-encoding nucleic acid sequences. The cassette encoding the one or more antigens be between 375-700 nucleotides in length and encode at least 3 distinct epitope-encoding nucleic acid sequences. The cassette encoding the one or more antigens can be between 375-700 nucleotides in length and include 1-10, 1-5, 1, 2, 3, 4, 5, 6, 7, 8, 9, 10, or more antigens.

[0230] The cassette encoding the one or more antigens can be 600, 500, 400, 300, 200, or 100 nucleotides in length or less. The cassette encoding the one or more antigens can be 600, 500, 400, 300, 200, or 100 nucleotides in length or less and encode 2 distinct epitope-encoding nucleic acid sequences. The cassette encoding the one or more antigens can be 600, 500, 400, 300, 200, or 100 nucleotides in length or less and encode at least 2 distinct epitope-encoding nucleic acid sequences. The cassette encoding the one or more antigens can be 600, 500, 400, 300, 200, or 100 nucleotides in length or less and encode 3 distinct epitope-encoding nucleic acid sequences. The cassette encoding the one or more antigens can be 600, 500, 400, 300, 200, or 100 nucleotides in length or less and encode at least 3 distinct epitope-encoding nucleic acid sequences. The cassette encoding the one or more antigens can be 600, 500, 400, 300, 200, or 100 nucleotides in length or less and include 1-10, 1-5, 1, 2, 3, 4, 5, 6, 7, 8, 9, 10, or more antigens.

[0231] The cassette encoding the one or more antigens can be between 375-600, between 375-500, or between 375-400 nucleotides in length. The cassette encoding the one or more antigens can be between 375-600, between 375-500, or between 375-400 nucleotides in length and encode 2 distinct epitope-encoding nucleic acid sequences. The cassette encoding the one or more antigens can be between 375-600, between 375-500, or between 375-400 nucleotides in length and encode at least 2 distinct epitope-encoding nucleic acid sequences. The cassette encoding the one or more antigens can be between 375-600, between 375-500, or between 375-400 nucleotides in length and encode 3 distinct epitope-encoding nucleic acid sequences. The cassette encoding the one or more antigens can be between 375-600, between 375-500, or between 375-400 nucleotides in length and encode at least 3 distinct epitope-encoding nucleic acid sequences. The cassette encoding the one or more antigens can be between 375-600, between 375-500, or between 375-400 nucleotides in length and include 1-10, 1-5, 1, 2, 3, 4, 5, 6, 7, 8, 9, 10, or more antigens.

[0232] In some instances, an antigen or epitope in a cassette encoding additional antigens and/or epitopes may be an immunodominant epitope relative to the others encoded. Immunodominance, in general, is the skewing of an immune response towards only one or a few specific immunogenic peptides. Immunodominance can be assessed as part of an immune monitoring protocol. For example, immunodominance can be assessed through evaluating T cell and/or B cell responses to the encoded antigens.

[0233] Immunodominance can be assessed as the impact of an immunodominant antigen's presence on the immune response to one or more other antigens. For example, an immunodominant antigen and its respective immune response (e.g., an immunodominant MHC class I epitope) can reduce the immune response of another antigen relative to the immune response in the absence of the immunodominant antigen. This reduction can be such that the immune response in the presence of the immunodominant antigen is not considered a therapeutically effective response. For example, an MHC class I epitope would generally be considered immunodominant if T cell responses to other antigens are no longer considered therapeutically effective responses compared to responses elicited in the absence of the immunodominant MHC class I epitope. An immune response can also be reduced to below a limit of detection or near the limit of detection. relative to the response in the absence of the immunodominant antigen. For example, an MHC class I epitope would generally be considered immunodominant if T cell responses to other antigens are at or below the limit of detection compared to responses elicited in the absence of the immunodominant MHC class I epitope. In general, the assessment of immunodominance is between two antigens both capable of stimulating an immune response, e.g., between two T cell epitopes in a vaccine composition administered to a subject possessing a cognate MHC allele known or predicted to present each epitope, respectively. Immunodominance can be assessed through evaluating relative immune responses to other antigens in the presence and absence of the suspected immunodominant antigen.

[0234] Immunodominance can be assessed as a relative difference in the immune responses between two or more antigens. Immunodominance can refer to a 5-fold, 10-fold, 20-fold, 30-fold, 40-fold, or 50-fold immune response of a specific antigen relative to another antigen encoded in the same cassette. Immunodominance can refer to a 100-fold, 200-fold, 300-fold, 400-fold, or 500-fold immune response of a specific antigen relative to another antigen encoded in the same cassette. Immunodominance can refer to a 1000-fold, 2000-fold, 3000-fold, 4000-fold, or 5000-fold immune response of a specific antigen relative to another antigen encoded in the same cassette. Immunodominance can refer to a 10,000-fold immune response of a specific antigen relative to another antigen encoded in the same cassette.

[0235] In some instances, it may be desired to avoid vaccine compositions containing an immunodominant epitope. For example, it may be desired to avoid designing a vaccine cassette encoding an immunodominant epitope. Without wishing to be bound by theory, administering and/or encoding an immunodominant epitope together with additional epitope may reduce the immune response to the additional epitopes, including potentially ultimately reducing vaccine efficacy against the additional epitopes. As an illustrative non-limiting example, vaccine compositions including TP53-associated neoepitopes may have the immune response, e.g., a T cell response, skewed towards the TP53-associated neoepitope negatively impacting (e.g., reducing the immune response to where the immune response is not a therapeutically effective response and/or to below a limit of detection) the immune response to other antigens or epitopes in the vaccine composition (e.g., one or more KRAS-associated neoepitopes in the vaccine composition, such as any of the KRAS-associated neoepitopes shown in SEQ ID NOs. 75-82). Accordingly, vaccine compositions can be designed to not contain an immunodominant epitope, such as designing a vaccine cassette (e.g., a (neo)antigen-encoding cassette) to not encode an immunodominant epitope. For example, the cassette does not encode an epitope that reduces an immune response to another epitope encoded in the cassette when administered in a vaccine composition to a subject relative to an immune response when the other epitope is administered in the absence of the immunodominant MHC class I epitope. In another example, the cassette does not encode an epitope that reduces an immune response to another epitope encoded in the cassette to below a limit of detection when administered in a vaccine composition to a subject relative to an immune response when the other epitope is administered in the absence of the immunodominant MHC class I epitope. In another example, the cassette does not encode an epitope that reduces an immune response to another epitope encoded in the cassette, wherein the immune response is not a therapeutically effective response, when administered in a vaccine composition to a subject relative to an immune response when the other epitope is administered in the absence of the immunodominant MHC class I epitope. In another example, the cassette does not encode an epitope that stimulates a 5-fold, 10-fold, 20-fold, 30-fold, 40-fold, or 50-fold or greater immune response relative to another epitope encoded in the same cassette in a vaccine composition administered to a subject, where each antigen is capable of stimulating an immune response in the subject. In another example, the cassette does not encode an epitope that stimulates a 100-fold, 200-fold, 300-fold, 400-fold, or 500-fold or greater immune response relative to another epitope encoded in the same cassette in a vaccine composition administered to a subject, where each antigen is capable of stimulating an immune response in the subject. In another example, the cassette does not encode an epitope that stimulates a 1000-fold, 2000-fold, 3000-fold, 4000-fold, or 5000-fold or greater immune response relative to another epitope encoded in the same cassette in a vaccine composition administered to a subject, where each antigen is capable of stimulating an immune response in the subject. In another example, the cassette does not encode an epitope that results in a 10,000-fold or greater immune response relative to another epitope encoded in the same cassette in a vaccine composition administered to a subject, where each antigen is capable of stimulating an immune response in the subject.

### V.B. Immune Modulators

[0236] Vectors described herein, such as C68 vectors described herein or alphavirus vectors described herein, can comprise a nucleic acid which encodes at least one antigen and the same or a separate vector can comprise a nucleic acid which encodes at least one immune modulator. An immune modulator can include a binding molecule (e.g., an antibody such as an scFv) which binds to and blocks the activity of an immune checkpoint molecule. An immune modulator can include a cytokine, such as IL-2, IL-7, IL-12 (including IL-12 p35, p40, p70, and/or p70-fusion constructs), IL-15, or IL-21. An immune modulator can include a modified cytokine (e.g., pegIL-2). Vectors can comprise an antigen cassette and one or more nucleic acid molecules encoding an immune modulator.

[0237] Illustrative immune checkpoint molecules that can be targeted for blocking or inhibition include, but are not limited to, CTLA-4, 4-1BB (CD137), 4-1BBL (CD137L), PDL1, PDL2, PD1, B7-H3, B7-H4, BTLA, HVEM, TIM3, GAL9, LAG3, TIM3, B7H3, B7H4, VISTA, KIR, 2B4 (belongs to the CD2 family of molecules and is expressed on all NK, y6, and memory CD8+(ap) T cells), CD160 (also referred to as BY55), and CGEN-15049. Immune checkpoint inhibitors include antibodies, or antigen binding fragments thereof, or other binding proteins, that bind to and block or inhibit the activity of one or more of CTLA-4, PDL1, PDL2, PD1, B7-H3, B7-H4, BTLA, HVEM, TIM3, GAL9, LAG3, TIM3, B7H3, B7H4, VISTA, KIR, 2B4, CD160, and CGEN-15049. Illustrative immune checkpoint inhibitors include Tremelimumab (CTLA-4 blocking antibody), anti-OX40, PD-L1 monoclonal Antibody (Anti-B7-H1; MEDI4736), ipilimumab, MK-3475 (PD-1 blocker), Nivolumab (anti-PD1 antibody), Cemiplimab (anti-PD1 antibody), CT-011 (anti-PD1 antibody), BY55 monoclonal antibody, AMP224 (anti-PDL1 antibody), BMS-936559 (anti-PDL1 antibody), MPDL3280A/Atezolizumab (anti-PDL1 antibody), MSB0010718C (anti-PDL1 antibody) and Yervoy/ipilimumab (anti-CTLA-4 checkpoint inhibitor). Antibody-encoding sequences can be engineered into vectors such as C68 using ordinary skill in the art. An exemplary method is described in Fang et al., Stable antibody expression at therapeutic levels using the 2A peptide. Nat Biotechnol. 2005 May; 23(5):584-90. Epub 2005 Apr. 17; herein incorporated by reference for all purposes.

### V.C. Additional Considerations for Vaccine Design and Manufacture

[0238] V.C.1. Determination of a Set of Peptides that Cover all Tumor Subclones

[0239] Truncal peptides, meaning those presented by all or most tumor subclones, can be prioritized for inclusion into a vaccine.⁵³ Optionally, if there are no truncal peptides predicted to be presented and immunogenic with high probability, or if the number of truncal peptides predicted to be presented and immunogenic with high probability is small enough that additional non-truncal peptides can be included in the vaccine, then further peptides can be prioritized by estimating the number and identity of tumor subclones and choosing peptides so as to maximize the number of tumor subclones covered by a vaccine.⁵⁴

### V.C.2. Antigen Prioritization

[0240] After all of the above antigen filters are applied, more candidate antigens may still be available for vaccine inclusion than the vaccine technology can support. Additionally, uncertainty about various aspects of the antigen analysis may remain and tradeoffs may exist between different properties of candidate vaccine antigens. Thus, in place of predetermined filters at each step of the selection process, an integrated multi-dimensional model can be considered that places candidate antigens in a space with at least the following axes and optimizes selection using an integrative approach.
[0241] 1. Risk of auto-immunity or tolerance (risk of germline) (lower risk of auto-immunity is typically preferred)
[0242] 2. Probability of sequencing artifact (lower probability of artifact is typically preferred)
[0243] 3. Probability of immunogenicity (higher probability of immunogenicity is typically preferred)
[0244] 4. Probability of presentation (higher probability of presentation is typically preferred)
[0245] 5. Gene expression (higher expression is typically preferred)
[0246] 6. Coverage of HLA genes (larger number of HLA molecules involved in the presentation of a set of antigens may lower the probability that a tumor will escape immune attack via downregulation or mutation of HLA molecules)
[0247] 7. Coverage of HLA classes (covering both HLA-I and HLA-II may increase the probability of therapeutic response and decrease the probability of tumor escape)

[0248] Additionally, optionally, antigens can be deprioritized (e.g., excluded) from the vaccination if they are predicted to be presented by HLA alleles lost or inactivated in either all or part of the patient's tumor. HLA allele loss can occur by either somatic mutation, loss of heterozygosity, or homozygous deletion of the locus. Methods for detection of HLA allele somatic mutation are well known in the art, e.g. (Shukla et al., 2015). Methods for detection of somatic LOH and homozygous deletion (including for HLA locus) are likewise well described. (Carter et al., 2012; McGranahan et al., 2017; Van Loo et al., 2010). Antigens can also be deprioritized if mass-spectrometry data indicates a predicted antigen is not presented by a predicted HLA allele.

### V.D. Alphavirus

### V.D.1. Alphavirus Biology

[0249] Alphaviruses are members of the family Togaviridae, and are positive-sense single stranded RNA viruses. Members are typically classified as either Old World, such as Sindbis, Ross River, Mayaro, Chikungunya, and Semliki Forest viruses, or New World, such as eastern equine encephalitis, Aura, Fort Morgan, or Venezuelan equine encephalitis virus and its derivative strain TC-83 (Strauss Microbial Review 1994). A natural alphavirus genome is typically around 12 kb in length, the first two-thirds of which contain genes encoding non-structural proteins (nsPs) that form RNA replication complexes for self-replication of the viral genome, and the last third of which contains a subgenomic expression cassette encoding structural proteins for virion production (Frolov RNA 2001).

[0250] A model lifecycle of an alphavirus involves several distinct steps (Strauss Microbial Review 1994, Jose Future Microbiol 2009). Following virus attachment to a host cell, the virion fuses with membranes within endocytic compartments resulting in the eventual release of genomic RNA into the cytosol. The genomic RNA, which is in a plus-strand orientation and comprises a 5′ methylguanylate cap and 3′ polyA tail, is translated to produce non-structural proteins nsP1-4 that form the replication complex. Early in infection, the plus-strand is then replicated by the complex into a minus-stand template. In the current model, the replication complex is further processed as infection progresses, with the resulting processed complex switching to transcription of the minus-strand into both full-length positive-strand genomic RNA, as well as the 26S subgenomic positive-strand RNA containing the structural genes. Several conserved sequence elements (CSEs) of alphavirus have been identified to potentially play a role in the various RNA replication steps including; a complement of the 5′ UTR in the replication of plus-strand RNAs from a minus-strand template, a 51-nt CSE in the replication of minus-strand synthesis from the genomic template, a 24-nt CSE in the junction region between the nsPs and the 26S RNA in the transcription of the subgenomic RNA from the minus-strand, and a 3′ 19-nt CSE in minus-strand synthesis from the plus-strand template.

[0251] Following the replication of the various RNA species, virus particles are then typically assembled in the natural lifecycle of the virus. The 26S RNA is translated and the resulting proteins further processed to produce the structural proteins including capsid protein, glycoproteins E1 and E2, and two small polypeptides E3 and 6K (Strauss 1994). Encapsidation of viral RNA occurs, with capsid proteins normally specific for only genomic RNA being packaged, followed by virion assembly and budding at the membrane surface.

### V.D.2. Alphavirus as a Delivery Vector

[0252] Alphaviruses (including alphavirus sequences, features, and other elements) can be used to generate alphavirus-based delivery vectors (also be referred to as alphavirus vectors, alphavirus viral vectors, alphavirus vaccine vectors, self-replicating RNA (srRNA) vectors, self-amplifying mRNA (SAM) vectors, or samRNA vectors). Alphaviruses have previously been engineered for use as expression vector systems (Pushko 1997, Rheme 2004). Alphaviruses offer several advantages, particularly in a vaccine setting where heterologous antigen expression can be desired. Due to its ability to self-replicate in the host cytosol, alphavirus vectors are generally able to produce high copy numbers of the expression cassette within a cell resulting in a high level of heterologous antigen production. Additionally, the vectors are generally transient, resulting in improved biosafety as well as reduced induction of immunological tolerance to the vector. The public, in general, also lacks pre-existing immunity to alphavirus vectors as compared to other standard viral vectors, such as human adenovirus. Alphavirus based vectors also generally result in cytotoxic responses to infected cells. Cytotoxicity, to a certain degree, can be important in a vaccine setting to properly stimulate an immune response to the heterologous antigen expressed. However, the degree of desired cytotoxicity can be a balancing act, and thus several attenuated alphaviruses have been developed, including the TC-83 strain of VEE. Thus, an example of an antigen expression vector described herein can utilize an alphavirus backbone that allows for a high level of antigen expression, stimulates a robust immune response to antigen, does not stimulate an immune response to the vector itself, and can be used in a safe manner. Furthermore, the antigen expression cassette can be designed to stimulate different levels of an immune response through optimization of which alphavirus sequences the vector uses, including, but not limited to, sequences derived from VEE or its attenuated derivative TC-83.

[0253] Several expression vector design strategies have been engineered using alphavirus sequences (Pushko 1997). In one strategy, a alphavirus vector design includes inserting a second copy of the 26S promoter sequence elements downstream of the structural protein genes, followed by a heterologous gene (Frolov 1993). Thus, in addition to the natural non-structural and structural proteins, an additional subgenomic RNA is produced that expresses the heterologous protein. In this system, all the elements for production of infectious virions are present and, therefore, repeated rounds of infection of the expression vector in non-infected cells can occur.

[0254] Another expression vector design makes use of helper virus systems (Pushko 1997). In this strategy, the structural proteins are replaced by a heterologous gene. Thus, following self-replication of viral RNA mediated by still intact non-structural genes, the 26S subgenomic RNA provides for expression of the heterologous protein. Traditionally, additional vectors that expresses the structural proteins are then supplied in trans, such as by co-transfection of a cell line, to produce infectious virus. A system is described in detail in U.S. Pat. No. 8,093,021, which is herein incorporated by reference in its entirety, for all purposes. The helper vector system provides the benefit of limiting the possibility of forming infectious particles and, therefore, improves biosafety. In addition, the helper vector system reduces the total vector length, potentially improving the replication and expression efficiency. Thus, an example of an antigen expression vector described herein can utilize an alphavirus backbone wherein the structural proteins are replaced by an antigen cassette, the resulting vector both reducing biosafety concerns, while at the same time promoting efficient expression due to the reduction in overall expression vector size.

### V.D.3. Alphavirus Production In Vitro

[0255] Alphavirus delivery vectors are generally positive-sense RNA polynucleotides. A convenient technique well-known in the art for RNA production is in vitro transcription IVT. In this technique, a DNA template of the desired vector is first produced by techniques well-known to those in the art, including standard molecular biology techniques such as cloning, restriction digestion, ligation, gene synthesis (e.g., chemical and/or enzymatic synthesis), and polymerase chain reaction (PCR). The DNA template contains a RNA polymerase promoter at the 5′ end of the sequence desired to be transcribed into RNA. Promoters include, but are not limited to, bacteriophage polymerase promoters such as T3, T7, or SP6. The DNA template is then incubated with the appropriate RNA polymerase enzyme, buffer agents, and nucleotides (NTPs). The resulting RNA polynucleotide can optionally be further modified including, but limited to, addition of a 5′ cap structure such as 7-methylguanosine or a related structure, and optionally modifying the 3′ end to include a polyadenylate (polyA) tail. The RNA can then be purified using techniques well-known in the field, such as phenol-chloroform extraction or column purification (e.g., chromatography-based purification).

### V.D.4. Delivery Via Lipid Nanoparticle

[0256] An important aspect to consider in vaccine vector design is immunity against the vector itself (Riley 2017). This may be in the form of preexisting immunity to the vector itself, such as with certain human adenovirus systems, or in the form of developing immunity to the vector following administration of the vaccine. The latter is an important consideration if multiple administrations of the same vaccine are performed, such as separate priming and boosting doses, or if the same vaccine vector system is to be used to deliver different antigen cassettes.

[0257] In the case of alphavirus vectors, the standard delivery method is the previously discussed helper virus system that provides capsid, E1, and E2 proteins in trans to produce infectious viral particles. However, it is important to note that the E1 and E2 proteins are often major targets of neutralizing antibodies (Strauss 1994). Thus, the efficacy of using alphavirus vectors to deliver antigens of interest to target cells may be reduced if infectious particles are targeted by neutralizing antibodies.

[0258] An alternative to viral particle mediated gene delivery is the use of nanomaterials to deliver expression vectors (Riley 2017). Nanomaterial vehicles, importantly, can be made of non-immunogenic materials and generally avoid eliciting immunity to the delivery vector itself. These materials can include, but are not limited to, lipids, inorganic nanomaterials, and other polymeric materials. Lipids can be cationic, anionic, or neutral. The materials can be synthetic or naturally derived, and in some instances biodegradable. Lipids can include fats, cholesterol, phospholipids, lipid conjugates including, but not limited to, polyethyleneglycol (PEG) conjugates (PEGylated lipids), waxes, oils, glycerides, and fat soluble vitamins.

[0259] Lipid nanoparticles (LNPs) are an attractive delivery system due to the amphiphilic nature of lipids enabling formation of membranes and vesicle like structures (Riley 2017). In general, these vesicles deliver the expression vector by absorbing into the membrane of target cells and releasing nucleic acid into the cytosol. In addition, LNPs can be further modified or functionalized to facilitate targeting of specific cell types. Another consideration in LNP design is the balance between targeting efficiency and cytotoxicity. Lipid compositions generally include defined mixtures of cationic, neutral, anionic, and amphipathic lipids. In some instances, specific lipids are included to prevent LNP aggregation, prevent lipid oxidation, or provide functional chemical groups that facilitate attachment of additional moieties. Lipid composition can influence overall LNP size and stability. In an example, the lipid composition comprises dilinoleylmethyl-4-dimethylaminobutyrate (MC3) or MC3-like molecules. MC3 and MC3-like lipid compositions can be formulated to include one or more other lipids, such as a PEG or PEG-conjugated lipid, a sterol, or neutral lipids.

[0260] Nucleic-acid vectors, such as expression vectors, exposed directly to serum can have several undesirable consequences, including degradation of the nucleic acid by serum nucleases or off-target stimulation of the immune system by the free nucleic acids. Therefore, encapsulation of the alphavirus vector can be used to avoid degradation, while also avoiding potential off-target affects. In certain examples, an alphavirus vector is fully encapsulated within the delivery vehicle, such as within the aqueous interior of an LNP. Encapsulation of the alphavirus vector within an LNP can be carried out by techniques well-known to those skilled in the art, such as microfluidic mixing and droplet generation carried out on a microfluidic droplet generating device. Such devices include, but are not limited to, standard T-junction devices or flow-focusing devices. In an example, the desired lipid formulation, such as MC3 or MC3-like containing compositions, is provided to the droplet generating device in parallel with the alphavirus delivery vector and other desired agents, such that the delivery vector and desired agents are fully encapsulated within the interior of the MC3 or MC3-like based LNP. In an example, the droplet generating device can control the size range and size distribution of the LNPs produced. For example, the LNP can have a size ranging from 1 to 1000 nanometers in diameter, e.g., 1, 10, 50, 100, 500, or 1000 nanometers. Following droplet generation, the delivery vehicles encapsulating the expression vectors can be further treated or modified to prepare them for administration.

### V.E. Chimpanzee Adenovirus (ChAd)

[0261] V.E.1. Viral Delivery with Chimpanzee Adenovirus

[0262] Vaccine compositions for delivery of one or more antigens (e.g., via an antigen cassette and including one or more neoantigens shown in Table A and/or AACR GENIE Results, and/or one or more antigens shown in Table 1.2) can be created by providing adenovirus nucleotide sequences of chimpanzee origin, a variety of novel vectors, and cell lines expressing chimpanzee adenovirus genes. A nucleotide sequence of a chimpanzee C68 adenovirus (also referred to herein as ChAdV68) can be used in a vaccine composition for antigen delivery (See SEQ ID NO: 1). Use of C68 adenovirus derived vectors is described in further detail in U.S. Pat. No. 6,083,716, which is herein incorporated by reference in its entirety, for all purposes. ChAdV68-based vectors and delivery systems are described in detail in US App. Pub. No. US20200197500A1 and international patent application publication WO2020243719A1, each of which is herein incorporated by reference for all purposes.

[0263] In a further aspect, provided herein is a recombinant adenovirus comprising the DNA sequence of a chimpanzee adenovirus such as C68 and an antigen cassette operatively linked to regulatory sequences directing its expression. The recombinant virus is capable of infecting a mammalian, preferably a human, cell and capable of expressing the antigen cassette product in the cell. In this vector, the native chimpanzee E1 gene, and/or E3 gene, and/or E4 gene can be deleted. An antigen cassette can be inserted into any of these sites of gene deletion. The antigen cassette can include an antigen against which a primed immune response is desired.

[0264] In another aspect, provided herein is a mammalian cell infected with a chimpanzee adenovirus such as C68.

[0265] In still a further aspect, a novel mammalian cell line is provided which expresses a chimpanzee adenovirus gene (e.g., from C68) or functional fragment thereof.

[0266] In still a further aspect, provided herein is a method for delivering an antigen cassette into a mammalian cell comprising the step of introducing into the cell an effective amount of a chimpanzee adenovirus, such as C68, that has been engineered to express the antigen cassette.

[0267] Still another aspect provides a method for stimulating an immune response in a mammalian host to treat cancer. The method can comprise the step of administering to the host an effective amount of a recombinant chimpanzee adenovirus, such as C68, comprising an antigen cassette that encodes one or more antigens from the tumor against which the immune response is targeted.

[0268] Still another aspect provides a method for stimulating an immune response in a mammalian host to treat or prevent a disease in a subject. The method can comprise the step of administering to the host an effective amount of a recombinant chimpanzee adenovirus, such as C68, comprising an antigen cassette that encodes one or more antigens, such as from disease against which the immune response is targeted.

[0269] Also disclosed is a non-simian mammalian cell that expresses a chimpanzee adenovirus gene obtained from the sequence of SEQ ID NO: 1. The gene can be selected from the group consisting of the adenovirus E1A, E1B, E2A, E2B, E3, E4, L1, L2, L3, L4 and L5 of SEQ ID NO: 1.

[0270] Also disclosed is a nucleic acid molecule comprising a chimpanzee adenovirus DNA sequence comprising a gene obtained from the sequence of SEQ ID NO: 1. The gene can be selected from the group consisting of said chimpanzee adenovirus E1A, E1B, E2A, E2B, E3, E4, L1, L2, L3, L4 and L5 genes of SEQ ID NO: 1. In some aspects the nucleic acid molecule comprises SEQ ID NO: 1. In some aspects the nucleic acid molecule comprises the sequence of SEQ ID NO: 1, lacking at least one gene selected from the group consisting of E1A, E1B, E2A, E2B, E3, E4, L1, L2, L3, L4 and L5 genes of SEQ ID NO: 1.

[0271] Also disclosed is a vector comprising a chimpanzee adenovirus DNA sequence obtained from SEQ ID NO: 1 and an antigen cassette operatively linked to one or more regulatory sequences which direct expression of the cassette in a heterologous host cell, optionally wherein the chimpanzee adenovirus DNA sequence comprises at least the cis-elements necessary for replication and virion encapsidation, the cis-elements flanking the antigen cassette and regulatory sequences. In some aspects, the chimpanzee adenovirus DNA sequence comprises a gene selected from the group consisting of E1A, E1B, E2A, E2B, E3, E4, L1, L2, L3, L4 and L5 gene sequences of SEQ ID NO: 1. In some aspects the vector can lack the E1A and/or E1B gene.

[0272] Also disclosed herein is a adenovirus vector comprising: a partially deleted E4 gene comprising a deleted or partially-deleted E4orf2 region and a deleted or partially-deleted E4orf3 region, and optionally a deleted or partially-deleted E4orf4 region. The partially deleted E4 can comprise an E4 deletion of at least nucleotides 34,916 to 35,642 of the sequence shown in SEQ ID NO:1, and wherein the vector comprises at least nucleotides 2 to 36,518 of the sequence set forth in SEQ ID NO:1. The partially deleted E4 can comprise an E4 deletion of at least a partial deletion of nucleotides 34,916 to 34,942 of the sequence shown in SEQ ID NO:1, at least a partial deletion of nucleotides 34,952 to 35,305 of the sequence shown in SEQ ID NO:1, and at least a partial deletion of nucleotides 35,302 to 35,642 of the sequence shown in SEQ ID NO:1, and wherein the vector comprises at least nucleotides 2 to 36,518 of the sequence set forth in SEQ ID NO:1 The partially deleted E4 can comprise an E4 deletion of at least nucleotides 34,980 to 36,516 of the sequence shown in SEQ ID NO:1, and wherein the vector comprises at least nucleotides 2 to 36,518 of the sequence set forth in SEQ ID NO:1. The partially deleted E4 can comprise an E4 deletion of at least nucleotides 34,979 to 35,642 of the sequence shown in SEQ ID NO:1, and wherein the vector comprises at least nucleotides 2 to 36,518 of the sequence set forth in SEQ ID NO:1. The partially deleted E4 can comprise an E4 deletion of at least a partial deletion of E4Orf2, a fully deleted E4Orf3, and at least a partial deletion of E4Orf4. The partially deleted E4 can comprise an E4 deletion of at least a partial deletion of E4Orf2, at least a partial deletion of E4Orf3, and at least a partial deletion of E4Orf4. The partially deleted E4 can comprise an E4 deletion of at least a partial deletion of E4Orf1, a fully deleted E4Orf2, and at least a partial deletion of E4Orf3. The partially deleted E4 can comprise an E4 deletion of at least a partial deletion of E4Orf2 and at least a partial deletion of E4Orf3. The partially deleted E4 can comprise an E4 deletion between the start site of E4Orf1 to the start site of E4Orf5. The partially deleted E4 can be an E4 deletion adjacent to the start site of E4Orf1. The partially deleted E4 can be an E4 deletion adjacent to the start site of E4Orf2. The partially deleted E4 can be an E4 deletion adjacent to the start site of E4Orf3. The partially deleted E4 can be an E4 deletion adjacent to the start site of E4Orf4. The E4 deletion can be at least 50, at least 100, at least 200, at least 300, at least 400, at least 500, at least 600, at least 700, at least 800, at least 900, at least 1000, at least 1100, at least 1200, at least 1300, at least 1400, at least 1500, at least 1600, at least 1700, at least 1800, at least 1900, or at least 2000 nucleotides. The E4 deletion can be at least 700 nucleotides. The E4 deletion can be at least 1500 nucleotides. The E4 deletion can be 50 or less, 100 or less, 200 or less, 300 or less, 400 or less, 500 or less, 600 or less, 700 or less, 800 or less, 900 or less, 1000 or less, 1100 or less, 1200 or less, 1300 or less, 1400 or less, 1500 or less, 1600 or less, 1700 or less, 1800 or less, 1900 or less, or 2000 or less nucleotides. The E4 deletion can be 750 nucleotides or less. The E4 deletion can be at least 1550 nucleotides or less.

[0273] A partially deleted E4 gene can be the E4 gene sequence shown in SEQ ID NO:1 that lacks at least nucleotides 34,916 to 35,642 of the sequence shown in SEQ ID NO:1. A partially deleted E4 gene can be the E4 gene sequence shown in SEQ ID NO:1 that lacks the E4 gene sequence shown in SEQ ID NO:1 and that lacks at least nucleotides 34,916 to 34,942, nucleotides 34,952 to 35,305 of the sequence shown in SEQ ID NO:1, and nucleotides 35,302 to 35,642 of the sequence shown in SEQ ID NO:1. A partially deleted E4 gene can be the E4 gene sequence shown in SEQ ID NO:1 and that lacks at least nucleotides 34,980 to 36,516 of the sequence shown in SEQ ID NO:1. A partially deleted E4 gene can be the E4 gene sequence shown in SEQ ID NO:1 and that lacks at least nucleotides 34,979 to 35,642 of the sequence shown in SEQ ID NO:1. The adenovirus vector having A partially deleted E4 gene can have a cassette, wherein the cassette comprises at least one payload nucleic acid sequence, and wherein the cassette comprises at least one promoter sequence operably linked to the at least one payload nucleic acid sequence. The adenovirus vector having A partially deleted E4 gene can have one or more genes or regulatory sequences of the ChAdV68 sequence shown in SEQ ID NO: 1, optionally wherein the one or more genes or regulatory sequences comprise at least one of the chimpanzee adenovirus inverted terminal repeat (ITR), E1A, E1B, E2A, E2B, E3, E4, L1, L2, L3, L4, and L5 genes of the sequence shown in SEQ ID NO: 1. The adenovirus vector having A partially deleted E4 gene can have nucleotides 2 to 34,915 of the sequence shown in SEQ ID NO:1, wherein A partially deleted E4 gene is 3′ of the nucleotides 2 to 34,915, and optionally the nucleotides 2 to 34,915 additionally lack nucleotides 577 to 3403 of the sequence shown in SEQ ID NO:1 corresponding to an E1 deletion and/or lack nucleotides 27,125 to 31,825 of the sequence shown in SEQ ID NO:1 corresponding to an E3 deletion. The adenovirus vector having A partially deleted E4 gene can have nucleotides 35,643 to 36,518 of the sequence shown in SEQ ID NO:1, and wherein A partially deleted E4 gene is 5′ of the nucleotides 35,643 to 36,518. The adenovirus vector having A partially deleted E4 gene can have nucleotides 2 to 34,915 of the sequence shown in SEQ ID NO:1, wherein A partially deleted E4 gene is 3′ of the nucleotides 2 to 34,915, the nucleotides 2 to 34,915 additionally lack nucleotides 577 to 3403 of the sequence shown in SEQ ID NO:1 corresponding to an E1 deletion and lack nucleotides 27,125 to 31,825 of the sequence shown in SEQ ID NO:1 corresponding to an E3 deletion. The adenovirus vector having A partially deleted E4 gene can have nucleotides 2 to 34,915 of the sequence shown in SEQ ID NO:1, wherein A partially deleted E4 gene is 3′ of the nucleotides 2 to 34,915, the nucleotides 2 to 34,915 additionally lack nucleotides 577 to 3403 of the sequence shown in SEQ ID NO:1 corresponding to an E1 deletion and lack nucleotides 27,125 to 31,825 of the sequence shown in SEQ ID NO:1 corresponding to an E3 deletion, and have nucleotides 35,643 to 36,518 of the sequence shown in SEQ ID NO:1, and wherein A partially deleted E4 gene is 5′ of the nucleotides 35,643 to 36,518.

[0274] A partially deleted E4 gene can be the E4 gene sequence shown in SEQ ID NO:1 that lacks at least nucleotides 34,916 to 35,642 of the sequence shown in SEQ ID NO:1, nucleotides 2 to 34,915 of the sequence shown in SEQ ID NO:1, wherein A partially deleted E4 gene is 3′ of the nucleotides 2 to 34,915, the nucleotides 2 to 34,915 additionally lack nucleotides 577 to 3403 of the sequence shown in SEQ ID NO:1 corresponding to an E1 deletion and lack nucleotides 27,125 to 31,825 of the sequence shown in SEQ ID NO:1 corresponding to an E3 deletion, and have nucleotides 35,643 to 36,518 of the sequence shown in SEQ ID NO:1, and wherein A partially deleted E4 gene is 5′ of the nucleotides 35,643 to 36,518.

[0275] Also disclosed herein is a host cell transfected with a vector disclosed herein such as a C68 vector engineered to expression an antigen cassette. Also disclosed herein is a human cell that expresses a selected gene introduced therein through introduction of a vector disclosed herein into the cell.

[0276] Also disclosed herein is a method for delivering an antigen cassette to a mammalian cell comprising introducing into said cell an effective amount of a vector disclosed herein, such as a ChAd vector or self-amplifying RNA vector engineered to express an antigen cassette.

[0277] Also disclosed herein is a method for producing an antigen comprising introducing a vector disclosed herein into a mammalian cell, culturing the cell under suitable conditions and producing the antigen.

### V.E.2. E1-Expressing Complementation Cell Lines

[0278] To generate recombinant chimpanzee adenoviruses (Ad) deleted in any of the genes described herein, the function of the deleted gene region, if essential to the replication and infectivity of the virus, can be supplied to the recombinant virus by a helper virus or cell line, i.e., a complementation or packaging cell line. For example, to generate a replication-defective chimpanzee adenovirus vector, a cell line can be used which expresses the E1 gene products of the human or chimpanzee adenovirus; such a cell line can include HEK293 or variants thereof. The protocol for the generation of the cell lines expressing the chimpanzee E1 gene products (Examples 3 and 4 of U.S. Pat. No. 6,083,716) can be followed to generate a cell line which expresses any selected chimpanzee adenovirus gene.

[0279] An AAV augmentation assay can be used to identify a chimpanzee adenovirus E1-expressing cell line. This assay is useful to identify E1 function in cell lines made by using the E1 genes of other uncharacterized adenoviruses, e.g., from other species. That assay is described in Example 4B of U.S. Pat. No. 6,083,716.

[0280] A selected chimpanzee adenovirus gene, e.g., E1, can be under the transcriptional control of a promoter for expression in a selected parent cell line. Inducible or constitutive promoters can be employed for this purpose. Among inducible promoters are included the sheep metallothionine promoter, inducible by zinc, or the mouse mammary tumor virus (MMTV) promoter, inducible by a glucocorticoid, particularly, dexamethasone. Other inducible promoters, such as those identified in International patent application WO95/13392, incorporated by reference herein can also be used in the production of packaging cell lines. Constitutive promoters in control of the expression of the chimpanzee adenovirus gene can be employed also.

[0281] A parent cell can be selected for the generation of a novel cell line expressing any desired C68 gene. Without limitation, such a parent cell line can be HeLa [ATCC Accession No. CCL 2], A549 [ATCC Accession No. CCL 185], KB [CCL 17], Detroit [e.g., Detroit 510, CCL 72] and WI-38 [CCL 75] cells. Other suitable parent cell lines can be obtained from other sources. Parent cell lines can include CHO, HEK293 or variants thereof, 911, HeLa, A549, LP-293, PER. C6, or AEl-2a.

[0282] An E1-expressing cell line can be useful in the generation of recombinant chimpanzee adenovirus E1 deleted vectors. Cell lines constructed using essentially the same procedures that express one or more other chimpanzee adenoviral gene products are useful in the generation of recombinant chimpanzee adenovirus vectors deleted in the genes that encode those products. Further, cell lines which express other human Ad E1 gene products are also useful in generating chimpanzee recombinant Ads.

### V.E.3. Recombinant Viral Particles as Vectors

[0283] The compositions disclosed herein can comprise viral vectors, that deliver at least one antigen to cells. Such vectors comprise a chimpanzee adenovirus DNA sequence such as C68 and an antigen cassette operatively linked to regulatory sequences which direct expression of the cassette. The C68 vector is capable of expressing the cassette in an infected mammalian cell. The C68 vector can be functionally deleted in one or more viral genes. An antigen cassette comprises at least one antigen under the control of one or more regulatory sequences such as a promoter. Optional helper viruses and/or packaging cell lines can supply to the chimpanzee viral vector any necessary products of deleted adenoviral genes.

[0284] The term “functionally deleted” means that a sufficient amount of the gene region is removed or otherwise altered, e.g., by mutation or modification, so that the gene region is no longer capable of producing one or more functional products of gene expression. Mutations or modifications that can result in functional deletions include, but are not limited to, nonsense mutations such as introduction of premature stop codons and removal of canonical and non-canonical start codons, mutations that alter mRNA splicing or other transcriptional processing, or combinations thereof. If desired, the entire gene region can be removed.

[0285] Modifications of the nucleic acid sequences forming the vectors disclosed herein, including sequence deletions, insertions, and other mutations may be generated using standard molecular biological techniques and are within the scope of this invention.

### V.E.4. Construction of the Viral Plasmid Vector

[0286] The chimpanzee adenovirus C68 vectors useful in this invention include recombinant, defective adenoviruses, that is, chimpanzee adenovirus sequences functionally deleted in the E1a or E1b genes, and optionally bearing other mutations, e.g., temperature-sensitive mutations or deletions in other genes. It is anticipated that these chimpanzee sequences are also useful in forming hybrid vectors from other adenovirus and/or adeno-associated virus sequences. Homologous adenovirus vectors prepared from human adenoviruses are described in the published literature [see, for example, Kozarsky I and II, cited above, and references cited therein, U.S. Pat. No. 5,240,846].

[0287] In the construction of useful chimpanzee adenovirus C68 vectors for delivery of an antigen cassette to a human (or other mammalian) cell, a range of adenovirus nucleic acid sequences can be employed in the vectors. A vector comprising minimal chimpanzee C68 adenovirus sequences can be used in conjunction with a helper virus to produce an infectious recombinant virus particle. The helper virus provides essential gene products required for viral infectivity and propagation of the minimal chimpanzee adenoviral vector. When only one or more selected deletions of chimpanzee adenovirus genes are made in an otherwise functional viral vector, the deleted gene products can be supplied in the viral vector production process by propagating the virus in a selected packaging cell line that provides the deleted gene functions in trans.

### V.E.5. Recombinant Minimal Adenovirus

[0288] A minimal chimpanzee Ad C68 virus is a viral particle containing just the adenovirus cis-elements necessary for replication and virion encapsidation. That is, the vector contains the cis-acting 5′ and 3′ inverted terminal repeat (ITR) sequences of the adenoviruses (which function as origins of replication) and the native 5′ packaging/enhancer domains (that contain sequences necessary for packaging linear Ad genomes and enhancer elements for the E1 promoter). See, for example, the techniques described for preparation of a “minimal” human Ad vector in International Patent Application WO96/13597 and incorporated herein by reference.

### V.E.6. Other Defective Adenoviruses

[0289] Recombinant, replication-deficient adenoviruses can also contain more than the minimal chimpanzee adenovirus sequences. These other Ad vectors can be characterized by deletions of various portions of gene regions of the virus, and infectious virus particles formed by the optional use of helper viruses and/or packaging cell lines.

[0290] As one example, suitable vectors may be formed by deleting all or a sufficient portion of the C68 adenoviral immediate early gene E1a and delayed early gene E1b, so as to eliminate their normal biological functions. Replication-defective E1-deleted viruses are capable of replicating and producing infectious virus when grown on a chimpanzee adenovirus-transformed, complementation cell line containing functional adenovirus E1a and E1b genes which provide the corresponding gene products in trans. Based on the homologies to known adenovirus sequences, it is anticipated that, as is true for the human recombinant E1-deleted adenoviruses of the art, the resulting recombinant chimpanzee adenovirus is capable of infecting many cell types and can express antigen(s), but cannot replicate in most cells that do not carry the chimpanzee E1 region DNA unless the cell is infected at a very high multiplicity of infection.

[0291] As another example, all or a portion of the C68 adenovirus delayed early gene E3 can be eliminated from the chimpanzee adenovirus sequence which forms a part of the recombinant virus.

[0292] Chimpanzee adenovirus C68 vectors can also be constructed having a deletion of the E4 gene. Still another vector can contain a deletion in the delayed early gene E2a.

[0293] Deletions can also be made in any of the late genes L1 through L5 of the chimpanzee C68 adenovirus genome. Similarly, deletions in the intermediate genes IX and JVa2 can be useful for some purposes. Other deletions may be made in the other structural or non-structural adenovirus genes.

[0294] The above discussed deletions can be used individually, i.e., an adenovirus sequence can contain deletions of E1 only. Alternatively, deletions of entire genes or portions thereof effective to destroy or reduce their biological activity can be used in any combination. For example, in one exemplary vector, the adenovirus C68 sequence can have deletions of the E1 genes and the E4 gene, or of the E1, E2a and E3 genes, or of the E1 and E3 genes, or of E1, E2a and E4 genes, with or without deletion of E3, and so on. As discussed above, such deletions can be used in combination with other mutations, such as temperature-sensitive mutations, to achieve a desired result.

[0295] The cassette comprising antigen(s) be inserted optionally into any deleted region of the chimpanzee C68 Ad virus. Alternatively, the cassette can be inserted into an existing gene region to disrupt the function of that region, if desired.

### V.E.7. Helper Viruses

[0296] Depending upon the chimpanzee adenovirus gene content of the viral vectors employed to carry the antigen cassette, a helper adenovirus or non-replicating virus fragment can be used to provide sufficient chimpanzee adenovirus gene sequences to produce an infective recombinant viral particle containing the cassette.

[0297] Useful helper viruses contain selected adenovirus gene sequences not present in the adenovirus vector construct and/or not expressed by the packaging cell line in which the vector is transfected. A helper virus can be replication-defective and contain a variety of adenovirus genes in addition to the sequences described above. The helper virus can be used in combination with the E1-expressing cell lines described herein.

[0298] For C68, the “helper” virus can be a fragment formed by clipping the C terminal end of the C68 genome with SspI, which removes about 1300 bp from the left end of the virus. This clipped virus is then co-transfected into an E1-expressing cell line with the plasmid DNA, thereby forming the recombinant virus by homologous recombination with the C68 sequences in the plasmid.

[0299] Helper viruses can also be formed into poly-cation conjugates as described in Wu et al, J. Biol. Chem., 264:16985-16987 (1989); K. J. Fisher and J. M. Wilson, Biochem. J., 299:49 (Apr. 1, 1994). Helper virus can optionally contain a reporter gene. A number of such reporter genes are known to the art. The presence of a reporter gene on the helper virus which is different from the antigen cassette on the adenovirus vector allows both the Ad vector and the helper virus to be independently monitored. This second reporter is used to enable separation between the resulting recombinant virus and the helper virus upon purification.

### V.E.8. Assembly of Viral Particle and Infection of a Cell Line

[0300] Assembly of the selected DNA sequences of the adenovirus, the antigen cassette, and other vector elements into various intermediate plasmids and shuttle vectors, and the use of the plasmids and vectors to produce a recombinant viral particle can all be achieved using conventional techniques. Such techniques include conventional cloning techniques of cDNA, in vitro recombination techniques (e.g., Gibson assembly), use of overlapping oligonucleotide sequences of the adenovirus genomes, polymerase chain reaction, and any suitable method which provides the desired nucleotide sequence. Standard transfection and co-transfection techniques are employed, e.g., CaPO4 precipitation techniques or liposome-mediated transfection methods such as lipofectamine. Other conventional methods employed include homologous recombination of the viral genomes, plaquing of viruses in agar overlay, methods of measuring signal generation, and the like.

[0301] For example, following the construction and assembly of the desired antigen cassette-containing viral vector, the vector can be transfected in vitro in the presence of a helper virus into the packaging cell line. Homologous recombination occurs between the helper and the vector sequences, which permits the adenovirus-antigen sequences in the vector to be replicated and packaged into virion capsids, resulting in the recombinant viral vector particles.

[0302] The resulting recombinant chimpanzee C68 adenoviruses are useful in transferring an antigen cassette to a selected cell. In in vivo experiments with the recombinant virus grown in the packaging cell lines, the E1-deleted recombinant chimpanzee adenovirus demonstrates utility in transferring a cassette to a non-chimpanzee, preferably a human, cell.

### V.E.9. Use of the Recombinant Virus Vectors

[0303] The resulting recombinant chimpanzee C68 adenovirus containing the antigen cassette (produced by cooperation of the adenovirus vector and helper virus or adenoviral vector and packaging cell line, as described above) thus provides an efficient gene transfer vehicle which can deliver antigen(s) to a subject in vivo or ex vivo.

[0304] The above-described recombinant vectors are administered to humans according to published methods for gene therapy. A chimpanzee viral vector bearing an antigen cassette can be administered to a patient, preferably suspended in a biologically compatible solution or pharmaceutically acceptable delivery vehicle. A suitable vehicle includes sterile saline. Other aqueous and non-aqueous isotonic sterile injection solutions and aqueous and non-aqueous sterile suspensions known to be pharmaceutically acceptable carriers and well known to those of skill in the art may be employed for this purpose.

[0305] The chimpanzee adenoviral vectors are administered in sufficient amounts to transduce the human cells and to provide sufficient levels of antigen transfer and expression to provide a therapeutic benefit without undue adverse or with medically acceptable physiological effects, which can be determined by those skilled in the medical arts. Conventional and pharmaceutically acceptable routes of administration include, but are not limited to, direct delivery to the liver, intranasal, intravenous, intramuscular, subcutaneous, intradermal, oral and other parental routes of administration. Routes of administration may be combined, if desired.

[0306] Dosages of the viral vector will depend primarily on factors such as the condition being treated, the age, weight and health of the patient, and may thus vary among patients. The dosage will be adjusted to balance the therapeutic benefit against any side effects and such dosages may vary depending upon the therapeutic application for which the recombinant vector is employed. The levels of expression of antigen(s) can be monitored to determine the frequency of dosage administration.

[0307] Recombinant, replication defective adenoviruses can be administered in a “pharmaceutically effective amount,” that is, an amount of recombinant adenovirus that is effective in a route of administration to transfect the desired cells and provide sufficient levels of expression of the selected gene to provide a vaccinal benefit, i.e., some measurable level of protective immunity. C68 vectors comprising an antigen cassette can be co-administered with adjuvant. Adjuvant can be separate from the vector (e.g., alum) or encoded within the vector, in particular if the adjuvant is a protein. Adjuvants are well known in the art.

[0308] Conventional and pharmaceutically acceptable routes of administration include, but are not limited to, intranasal, intramuscular, intratracheal, subcutaneous, intradermal, rectal, oral and other parental routes of administration. Routes of administration may be combined, if desired, or adjusted depending upon the immunogen or the disease. For example, in prophylaxis of rabies, the subcutaneous, intratracheal and intranasal routes are preferred. The route of administration primarily will depend on the nature of the disease being treated.

[0309] The levels of immunity to antigen(s) can be monitored to determine the need, if any, for boosters. Following an assessment of antibody titers in the serum, for example, optional booster immunizations may be desired

### VI. Therapeutic and Manufacturing Methods

[0310] Also provided is a method of stimulating a tumor specific immune response in a subject, vaccinating against a tumor, treating and or alleviating a symptom of cancer in a subject by administering to the subject one or more antigens such as a plurality of antigens identified using methods disclosed herein.

[0311] In some aspects, a subject has been diagnosed with cancer or is at risk of developing cancer. A subject can have been previously treated for cancer, such as previously undergone surgery to remove a tumor and/or cancerous tissue, chemotherapy, immunotherapy (e.g., immune checkpoint inhibitor therapy), radiation therapy, or combinations thereof. A subject can be a human, dog, cat, horse or any animal in which a tumor specific immune response is desired. A tumor can be any solid tumor such as breast, ovarian, prostate, lung, kidney, gastric, colon, testicular, head and neck, pancreas, brain, melanoma, and other tumors of tissue organs and hematological tumors, such as lymphomas and leukemias, including acute myelogenous leukemia, chronic myelogenous leukemia, chronic lymphocytic leukemia, T cell lymphocytic leukemia, and B cell lymphomas.

[0312] An antigen can be administered in an amount sufficient to stimulate a CTL response. An antigen can be administered in an amount sufficient to stimulate a T cell response. An antigen can be administered in an amount sufficient to stimulate a B cell response. An antigen can be administered in an amount sufficient to stimulate both a T cell response and a B cell response.

[0313] An antigen can be administered alone or in combination with other therapeutic agents. The therapeutic agent is for example, a chemotherapeutic agent, radiation, or immunotherapy. Any suitable therapeutic treatment for a particular cancer can be administered. A therapeutically effective amount of the therapeutic agent can be administered. An amount of the therapeutic agent can be administered that alone is not generally considered a therapeutically effective amount but demonstrates a beneficial property when co-administered with any of the vaccine compositions described herein.

[0314] In addition, a subject can be further administered an anti-immunosuppressive/immunostimulatory agent such as a checkpoint inhibitor. For example, the subject can be further administered an anti-CTLA antibody or anti-PD-1 or anti-PD-L1. Blockade of CTLA-4 or PD-L1 by antibodies can enhance the immune response to cancerous cells in the patient. In particular, CTLA-4 blockade has been shown effective when following a vaccination protocol.

[0315] The optimum amount of each antigen to be included in a vaccine composition and the optimum dosing regimen can be determined. For example, an antigen or its variant can be prepared for intravenous (i.v.) injection, sub-cutaneous (s.c.) injection, intradermal (i.d.) injection, intraperitoneal (i.p.) injection, intramuscular (i.m.) injection. Methods of injection include s.c., i.d., i.p., i.m., and i.v. Methods of DNA or RNA injection include i.d., i.m., s.c., i.p. and i.v. Other methods of administration of the vaccine composition are known to those skilled in the art.

[0316] A vaccine can be compiled so that the selection, number and/or amount of antigens present in the composition is/are tissue, cancer, and/or patient-specific. For instance, the exact selection of peptides can be guided by expression patterns of the parent proteins in a given tissue or guided by mutation status of a patient. The selection can be dependent on the specific type of cancer, the status of the disease, earlier treatment regimens, the immune status of the patient, and, of course, the HLA-haplotype of the patient. Furthermore, a vaccine can contain individualized components, according to personal needs of the particular patient. Examples include varying the selection of antigens according to the expression of the antigen in the particular patient or adjustments for secondary treatments following a first round or scheme of treatment.

[0317] A patient can be identified for administration of an antigen vaccine through the use of various diagnostic methods, e.g., patient selection methods described further below. Patient selection can involve identifying mutations in, or expression patterns of, one or more genes. In some cases, patient selection involves identifying the haplotype of the patient. The various patient selection methods can be performed in parallel, e.g., a sequencing diagnostic can identify both the mutations and the haplotype of a patient. The various patient selection methods can be performed sequentially, e.g., one diagnostic test identifies the mutations and separate diagnostic test identifies the haplotype of a patient, and where each test can be the same (e.g., both high-throughput sequencing) or different (e.g., one high-throughput sequencing and the other Sanger sequencing) diagnostic methods.

[0318] For a composition to be used as a vaccine for cancer, antigens with similar normal self-peptides that are expressed in high amounts in normal tissues can be avoided or be present in low amounts in a composition described herein. On the other hand, if it is known that the tumor of a patient expresses high amounts of a certain antigen, the respective pharmaceutical composition for treatment of this cancer can be present in high amounts and/or more than one antigen specific for this particularly antigen or pathway of this antigen can be included.

[0319] Compositions comprising an antigen can be administered to an individual already suffering from cancer. In therapeutic applications, compositions are administered to a subject in an amount sufficient to stimulate an immune response, such as stimulating an effective CTL response to the tumor antigen and to cure or at least partially arrest symptoms and/or complications. An immune response can include a reduction in tumor size or volume. Reduction in tumor size or volume can include at least a 5%, at least a 10%, at least a 15%, at least a 20%, at least a 25%, at least a 30%, at least a 35%, at least a 40%, at least a 45%, at least a 50%, at least a 55%, at least a 60%, at least a 65%, at least a 70%, at least a 75%, at least a 80%, at least a 85%, at least a 90%, or at least a 95% reduction. Reduction in tumor size or volume can include at least a 15% reduction. Reduction in tumor size or volume can include at least a 20% reduction. An immune response can include stabilization of tumor size or volume. An immune response can result in amelioration of a subject's disease, such a complete response (CR), partial response (PR), or stable disease (SD) (e.g., as assessed by criteria set forth in a clinical study). An amount adequate to accomplish this is defined as a “therapeutically effective dose.” Amounts effective for this use will depend on, e.g., the composition, the manner of administration, the stage and severity of the disease being treated, the weight and general state of health of the patient, and the judgment of the prescribing physician. It should be kept in mind that compositions can generally be employed in serious disease states, that is, life-threatening or potentially life threatening situations, especially when the cancer has metastasized. In such cases, in view of the minimization of extraneous substances and the relative nontoxic nature of an antigen, it is possible and can be felt desirable by the treating physician to administer substantial excesses of these compositions.

[0320] For therapeutic use, administration can begin at the detection or surgical removal of tumors. This can be followed by boosting doses until at least symptoms are substantially abated and for a period thereafter, or immunity is considered to be provided (e.g., a memory B cell or T cell population, or antigen specific B cells or antibodies are produced).

[0321] Compositions comprising an antigen (e.g., any of the compositions for delivery of a self-replicating alphavirus-based expression system or a chimpanzee adenovirus (ChAdV)-based expression system described herein) can be administered as an adjuvant therapy to a subject having already received a primary therapy. Compositions comprising an antigen can be administered 1, 2, 3, 4, 5, 6, 7, 8, 9, 10, 11, 12, 13, 14 days following a primary therapy, or 1, 2, 3, 4, 5, 6, 7, 8, 9, or 10 or more weeks following a primary therapy. For example, compositions comprising an antigen can be administered as an adjuvant therapy following surgery to remove tumors and/or cancerous tissues, including 1, 2, 3, 4, 5, 6, 7, 8, 9, 10, 11, 12, 13, 14, days following surgery, or 1, 2, 3, 4, 5, 6, 7, 8, 9, or 10 or more weeks following surgery.

[0322] Compositions comprising an antigen (e.g., any of the compositions for delivery of a self-replicating alphavirus-based expression system or a chimpanzee adenovirus (ChAdV)-based expression system described herein) can be administered as maintenance therapy to a subject having already received a primary therapy, such as where the subject's cancer is in remission (e.g., complete remission) after the primary therapy.

[0323] Primary therapies can include surgery to remove a tumor and/or cancerous tissue, chemotherapy, immunotherapy (e.g., immune checkpoint inhibitor therapy), radiation therapy, or combinations thereof. Primary therapy can include surgery. Primary therapy can include chemotherapies, such as oxaliplatin, fluoropyrimidine, and/or bevacizumab. Primary therapy can include a combination therapy of oxaliplatin, fluoropyrimidine, and bevacizumab.

[0324] Compositions comprising an antigen can be administered as an adjuvant therapy or maintenance therapy as a combination therapy with an additional therapy, such as administered in combination with chemotherapy, immune checkpoint inhibitor therapy, radiation therapy, or combinations thereof. Combination therapies can include fluoropyrimidine, bevacizumab, and/or an immune checkpoint inhibitor therapy. Combination therapies can include fluoropyrimidine and bevacizumab. Combination therapies can include fluoropyrimidine, bevacizumab, and an immune checkpoint inhibitor therapy (e.g., an anti-PD-1 or anti-PD-L1 antibody).

[0325] Immune checkpoint inhibitors can include (1) an anti-PD-1 antibody or an antigen-binding fragment thereof, (2) an anti-PD-L1 antibody or an antigen-binding fragment thereof, and/or (3) an anti-CTLA-4 antibody or an antigen-binding fragment thereof. Immune checkpoint inhibitor therapy can include administration of an anti-CTLA-4 antibody or an antigen-binding fragment thereof only with the priming dose and the first boosting dose. Immune checkpoint inhibitor therapy can include the anti-CTLA-4 antibody ipilimumab. Immune checkpoint inhibitor therapy can include ipilimumab administered at a dose of 30 mg subcutaneously. Immune checkpoint inhibitor therapy can include administration of an anti-PD-L1 antibody or an antigen-binding fragment thereof every 4 weeks (Q4W). Immune checkpoint inhibitor therapy can include the anti-PD-L1 antibody atezolizumab or nivolumab. Atezolizumab can be administered at a dose of 1680 mg intravenously. Nivolumab is administered at a dose of 480 mg intravenously.

[0326] Immune checkpoint inhibitor therapy can include at least 2, 3, 4, 5, 6, 7, 8, 9, 10, 11, 12, or 13 separate administrations, e.g., at least 2, 3, 4, 5, 6, 7, 8, 9, 10, 11, 12, or 13 separate administrations on or about every 28 days (or every 4 weeks and/or every month). Immune checkpoint inhibitor therapy can include administration of the anti-PD-L1 antibody or an antigen-binding fragment thereof including at least 2, 3, 4, 5, 6, 7, 8, 9, 10, 11, 12, or 13 administrations, e.g., on or about every 28 days (or every 4 weeks and/or every month). Immune checkpoint inhibitor therapy can include at least 13 separate administrations, e.g., on or about every 28 days (or every 4 weeks and/or every month). In some aspects, the administration of the anti-PD-L1 antibody or an antigen-binding fragment thereof comprises at least 13 administrations, e.g., on or about every 28 days (or every 4 weeks and/or every month).

[0327] A ChAdV-based expression system can be administered as a boosting dose on or about day 140 after the priming dose of the ChAdV-based expression system. A ChAdV-based expression system can be administered as a boosting dose on or about week 20 after the priming dose of the ChAdV-based expression system. A ChAdV-based expression system can be administered as a boosting dose on or about month 5 after the priming dose of the ChAdV-based expression system. A ChAdV-based expression system can be administered as a boosting dose on or after day 140 after the priming dose of the ChAdV-based expression system. A ChAdV-based expression system can be administered as a boosting dose on or after week 20 after the priming dose of the ChAdV-based expression system. A ChAdV-based expression system can be administered as a boosting dose on or after month 5 after the priming dose of the ChAdV-based expression system.

[0328] A self-replicating alphavirus-based expression system can be administered as at least two boosting doses. A self-replicating alphavirus-based expression system can be administered as at least two or more boosting doses at least 28 days apart. A self-replicating alphavirus-based expression system can be administered as at least two or more boosting doses at least 4 weeks (Q4W) apart. A self-replicating alphavirus-based expression system can be administered as at least two or more boosting doses at least one month apart. A self-replicating alphavirus-based expression system can be administered as at least two or more boosting doses at least 56 days apart. A self-replicating alphavirus-based expression system can be administered as at least two or more boosting doses at least 8 weeks (Q8W) apart. A self-replicating alphavirus-based expression system can be administered as at least two or more boosting doses at least 2 months apart.

[0329] A self-replicating alphavirus-based expression system can be administered as at least two boosting doses on or about days 28 and 84 after the priming dose of the ChAdV-based expression system. A self-replicating alphavirus-based expression system can be administered as at least two boosting doses on or about weeks 4 and 12 after the priming dose of the ChAdV-based expression system. A self-replicating alphavirus-based expression system can be administered as at least two boosting doses on or about months 1 and 3 after the priming dose of the ChAdV-based expression system.

[0330] A self-replicating alphavirus-based expression system can be administered as at least four boosting doses. A self-replicating alphavirus-based expression system can be administered on or about days 28, 84, 224, and 308 relative to the priming dose of the ChAdV-based expression system. A self-replicating alphavirus-based expression system can be administered on or about weeks 4, 12, 32, and 44 relative to the priming dose of the ChAdV-based expression system. A self-replicating alphavirus-based expression system can be administered on or about months 1, 3, 8, and 11 relative to the priming dose of the ChAdV-based expression system.

[0331] A ChAdV-based expression system can be administered as a boosting dose on or about, or after day 140 (or week 20 and/or month 5) after the priming dose of the ChAdV-based expression system, and a self-replicating alphavirus-based expression system can be administered as at least two boosting doses. A ChAdV-based expression system can be administered as a boosting dose on or about, or after day 140 (or week 20 and/or month 5) after the priming dose of the ChAdV-based expression system, and a self-replicating alphavirus-based expression system can be administered as at least two or more boosting doses at least 28 days apart. A ChAdV-based expression system can be administered as a boosting dose on or about, or after day 140 (or week 20 and/or month 5) after the priming dose of the ChAdV-based expression system, and a self-replicating alphavirus-based expression system can be administered as at least two or more boosting doses at least 4 weeks (Q4W) apart. A ChAdV-based expression system can be administered as a boosting dose on or about, or after day 140 (or week 20 and/or month 5) after the priming dose of the ChAdV-based expression system, and a self-replicating alphavirus-based expression system can be administered as at least two or more boosting doses at least one month apart. A ChAdV-based expression system can be administered as a boosting dose on or about, or after day 140 (or week 20 and/or month 5) after the priming dose of the ChAdV-based expression system, and a self-replicating alphavirus-based expression system can be administered as at least two or more boosting doses at least 56 days apart. A ChAdV-based expression system can be administered as a boosting dose on or about, or after day 140 (or week 20 and/or month 5) after the priming dose of the ChAdV-based expression system, and a self-replicating alphavirus-based expression system can be administered as at least two or more boosting doses at least 8 weeks (Q8W) apart. A ChAdV-based expression system can be administered as a boosting dose on or about, or after day 140 (or week 20 and/or month 5) after the priming dose of the ChAdV-based expression system, and a self-replicating alphavirus-based expression system can be administered as at least two or more boosting doses at least 2 months apart.

[0332] A ChAdV-based expression system can be administered as a boosting dose on or about, or after day 140 (or week 20 and/or month 5) after the priming dose of the ChAdV-based expression system, and a self-replicating alphavirus-based expression system can be administered as at least two boosting doses on or about days 28 and 84 after the priming dose of the ChAdV-based expression system. A ChAdV-based expression system can be administered as a boosting dose on or about, or after day 140 (or week 20 and/or month 5) after the priming dose of the ChAdV-based expression system, and a self-replicating alphavirus-based expression system can be administered as at least two boosting doses on or about weeks 4 and 12 after the priming dose of the ChAdV-based expression system. A ChAdV-based expression system can be administered as a boosting dose on or about, or after day 140 (or week 20 and/or month 5) after the priming dose of the ChAdV-based expression system, and a self-replicating alphavirus-based expression system can be administered as at least two boosting doses on or about months 1 and 3 after the priming dose of the ChAdV-based expression system.

[0333] A ChAdV-based expression system can be administered as a boosting dose on or about, or after day 140 (or week 20 and/or month 5) after the priming dose of the ChAdV-based expression system, and a self-replicating alphavirus-based expression system can be administered as at least four boosting doses. A ChAdV-based expression system can be administered as a boosting dose on or about, or after day 140 (or week 20 and/or month 5) after the priming dose of the ChAdV-based expression system, and a self-replicating alphavirus-based expression system can be administered on or about days 28, 84, 224, and 308 relative to the priming dose of the ChAdV-based expression system. A ChAdV-based expression system can be administered as a boosting dose on or about, or after day 140 (or week 20 and/or month 5) after the priming dose of the ChAdV-based expression system, and a self-replicating alphavirus-based expression system can be administered on or about weeks 4, 12, 32, and 44 relative to the priming dose of the ChAdV-based expression system. A ChAdV-based expression system can be administered as a boosting dose on or about, or after day 140 (or week 20 and/or month 5) after the priming dose of the ChAdV-based expression system, and a self-replicating alphavirus-based expression system can be administered on or about months 1, 3, 8, and 11 relative to the priming dose of the ChAdV-based expression system.

[0334] The pharmaceutical compositions (e.g., vaccine compositions) for therapeutic treatment are intended for parenteral, topical, nasal, oral or local administration. A pharmaceutical compositions can be administered parenterally, e.g., intravenously, subcutaneously, intradermally, or intramuscularly. The compositions can be administered at a site of surgical excision to stimulate a local immune response to a tumor. The compositions can be administered to target specific tissues, organs, and/or cells of a subject. Disclosed herein are compositions for parenteral administration which comprise a solution of the antigen and vaccine compositions are dissolved or suspended in an acceptable carrier, e.g., an aqueous carrier. A variety of aqueous carriers can be used, e.g., water, buffered water, 0.9% saline, 0.3% glycine, hyaluronic acid and the like. These compositions can be sterilized by conventional, well known sterilization techniques, or can be sterile filtered. The resulting aqueous solutions can be packaged for use as is, or lyophilized, the lyophilized preparation being combined with a sterile solution prior to administration. The compositions may contain pharmaceutically acceptable auxiliary substances as required to approximate physiological conditions, such as pH adjusting and buffering agents, tonicity adjusting agents, wetting agents and the like, for example, sodium acetate, sodium lactate, sodium chloride, potassium chloride, calcium chloride, sorbitan monolaurate, triethanolamine oleate, etc.

[0335] Antigens can also be administered via liposomes, which target them to a particular cells tissue, such as lymphoid tissue. Liposomes are also useful in increasing half-life. Liposomes include emulsions, foams, micelles, insoluble monolayers, liquid crystals, phospholipid dispersions, lamellar layers and the like. In these preparations the antigen to be delivered is incorporated as part of a liposome, alone or in conjunction with a molecule which binds to, e.g., a receptor prevalent among lymphoid cells, such as monoclonal antibodies which bind to the CD45 antigen, or with other therapeutic or immunogenic compositions. Thus, liposomes filled with a desired antigen can be directed to the site of lymphoid cells, where the liposomes then deliver the selected therapeutic/immunogenic compositions. Liposomes can be formed from standard vesicle-forming lipids, which generally include neutral and negatively charged phospholipids and a sterol, such as cholesterol. The selection of lipids is generally guided by consideration of, e.g., liposome size, acid lability and stability of the liposomes in the blood stream. A variety of methods are available for preparing liposomes, as described in, e.g., Szoka et al., Ann. Rev. Biophys. Bioeng. 9; 467 (1980), U.S. Pat. Nos. 4,235,871, 4,501,728, 4,501,728, 4,837,028, and 5,019,369.

[0336] For targeting to the immune cells, a ligand to be incorporated into the liposome can include, e.g., antibodies or fragments thereof specific for cell surface determinants of the desired immune system cells. A liposome suspension can be administered intravenously, locally, topically, etc. in a dose which varies according to, inter alia, the manner of administration, the peptide being delivered, and the stage of the disease being treated.

[0337] For therapeutic or immunization purposes, nucleic acids encoding a peptide and optionally one or more of the peptides described herein can also be administered to the patient. A number of methods are conveniently used to deliver the nucleic acids to the patient. For instance, the nucleic acid can be delivered directly, as “naked DNA”. This approach is described, for instance, in Wolff et al., Science 247: 1465-1468 (1990) as well as U.S. Pat. Nos. 5,580,859 and 5,589,466. The nucleic acids can also be administered using ballistic delivery as described, for instance, in U.S. Pat. No. 5,204,253. Particles comprised solely of DNA can be administered. Alternatively, DNA can be adhered to particles, such as gold particles. Approaches for delivering nucleic acid sequences can include viral vectors, mRNA vectors, and DNA vectors with or without electroporation.

[0338] The nucleic acids can also be delivered complexed to cationic compounds, such as cationic lipids. Lipid-mediated gene delivery methods are described, for instance, in 9618372WOAWO 96/18372; 9324640WOAWO 93/24640; Mannino & Gould-Fogerite, BioTechniques 6(7): 682-691 (1988); U.S. Pat. No. 5,279,833 Rose U.S. Pat. Nos. 5,279,833; 9,106,309WOAWO 91/06309; and Felgner et al., Proc. Natl. Acad. Sci. USA 84: 7413-7414 (1987).

[0339] Antigens can also be included in viral vector-based vaccine platforms, such as vaccinia, fowlpox, self-replicating alphavirus, marabavirus, adenovirus (See, e.g., Tatsis et al., Adenoviruses, Molecular Therapy (2004) 10, 616-629), or lentivirus, including but not limited to second, third or hybrid second/third generation lentivirus and recombinant lentivirus of any generation designed to target specific cell types or receptors (See, e.g., Hu et al., Immunization Delivered by Lentiviral Vectors for Cancer and Infectious Diseases, Immunol Rev. (2011) 239(1): 45-61, Sakuma et al., Lentiviral vectors: basic to translational, Biochem J. (2012) 443(3):603-18, Cooper et al., Rescue of splicing-mediated intron loss maximizes expression in lentiviral vectors containing the human ubiquitin C promoter, Nucl. Acids Res. (2015) 43 (1): 682-690, Zufferey et al., Self-Inactivating Lentivirus Vector for Safe and Efficient In Vivo Gene Delivery, J. Virol. (1998) 72 (12): 9873-9880). Dependent on the packaging capacity of the above mentioned viral vector-based vaccine platforms, this approach can deliver one or more nucleotide sequences that encode one or more antigen peptides. The sequences may be flanked by non-mutated sequences, may be separated by linkers or may be preceded with one or more sequences targeting a subcellular compartment (See, e.g., Gros et al., Prospective identification of neoantigen-specific lymphocytes in the peripheral blood of melanoma patients, Nat Med. (2016) 22 (4):433-8, Stronen et al., Targeting of cancer neoantigens with donor-derived T cell receptor repertoires, Science. (2016) 352 (6291):1337-41, Lu et al., Efficient identification of mutated cancer antigens recognized by T cells associated with durable tumor regressions, Clin Cancer Res. (2014) 20(13):3401-10). Upon introduction into a host, infected cells express the antigens, and thereby stimulate a host immune (e.g., CTL) response against the peptide(s). Vaccinia vectors and methods useful in immunization protocols are described in, e.g., U.S. Pat. No. 4,722,848. Another vector is BCG (Bacille Calmette Guerin). BCG vectors are described in Stover et al. (Nature 351:456-460 (1991)). A wide variety of other vaccine vectors useful for therapeutic administration or immunization of antigens, e.g., Salmonella typhi vectors, and the like will be apparent to those skilled in the art from the description herein.

[0340] A means of administering nucleic acids uses minigene constructs encoding one or multiple epitopes. To create a DNA sequence encoding the selected CTL epitopes (minigene) for expression in human cells, the amino acid sequences of the epitopes are reverse translated. A human codon usage table is used to guide the codon choice for each amino acid. These epitope-encoding DNA sequences are directly adjoined, creating a continuous polypeptide sequence. To optimize expression and/or immunogenicity, additional elements can be incorporated into the minigene design. Examples of amino acid sequence that could be reverse translated and included in the minigene sequence include: helper T lymphocyte, epitopes, a leader (signal) sequence, and an endoplasmic reticulum retention signal. In addition, MHC presentation of CTL epitopes can be improved by including synthetic (e.g. poly-alanine) or naturally-occurring flanking sequences adjacent to the CTL epitopes. The minigene sequence is converted to DNA by assembling oligonucleotides that encode the plus and minus strands of the minigene. Overlapping oligonucleotides (30-100 bases long) are synthesized, phosphorylated, purified and annealed under appropriate conditions using well known techniques. The ends of the oligonucleotides are joined using T4 DNA ligase. This synthetic minigene, encoding the CTL epitope polypeptide, can then cloned into a desired expression vector.

[0341] Purified plasmid DNA can be prepared for injection using a variety of formulations. The simplest of these is reconstitution of lyophilized DNA in sterile phosphate-buffer saline (PBS). A variety of methods have been described, and new techniques can become available. As noted above, nucleic acids are conveniently formulated with cationic lipids. In addition, glycolipids, fusogenic liposomes, peptides and compounds referred to collectively as protective, interactive, non-condensing (PINC) could also be complexed to purified plasmid DNA to influence variables such as stability, intramuscular dispersion, or trafficking to specific organs or cell types.

[0342] Also disclosed is a method of manufacturing a vaccine, e.g. a tumor vaccine, comprising performing the steps of a method disclosed herein; and producing a vaccine, e.g. a tumor vaccine, comprising a plurality of antigens or a subset of the plurality of antigens.

[0343] Antigens disclosed herein can be manufactured using methods known in the art. For example, a method of producing an antigen or a vector (e.g., a vector including at least one sequence encoding one or more antigens) disclosed herein can include culturing a host cell under conditions suitable for expressing the antigen or vector wherein the host cell comprises at least one polynucleotide encoding the antigen or vector, and purifying the antigen or vector. Standard purification methods include chromatographic techniques, electrophoretic, immunological, precipitation, dialysis, filtration, concentration, and chromatofocusing techniques.

[0344] Host cells can include a Chinese Hamster Ovary (CHO) cell, NSO cell, yeast, or a HEK293 cell. Host cells can be transformed with one or more polynucleotides comprising at least one nucleic acid sequence that encodes an antigen or vector disclosed herein, optionally wherein the isolated polynucleotide further comprises a promoter sequence operably linked to the at least one nucleic acid sequence that encodes the antigen or vector. In certain embodiments the isolated polynucleotide can be cDNA.

### VII. Antigen Use and Administration

[0345] A vaccination protocol can be used to dose a subject with one or more antigens. Vaccination methods, protocols, and schedules that can be used include, but are not limited to, those described in international application publication WO2021092095, herein incorporated by reference for all purposes.

[0346] A priming vaccine, can be based on C68 (e.g., the sequences shown in SEQ ID NO:1 or 2) or samRNA (e.g., the sequences shown in SEQ ID NO:3 or 4). A boosting vaccine can also be based on C68 (e.g., the sequences shown in SEQ ID NO:1 or 2) or samRNA (e.g., the sequences shown in SEQ ID NO:3 or 4).

[0347] Each vector in a prime/boost strategy typically includes a cassette that includes antigens. Cassettes can include about 1-50 antigens, separated by spacers such as the natural sequence that normally surrounds each antigen or other non-natural spacer sequences such as AAY. Cassettes can include about 20 neoantigens, e.g., 20 subject and/or tumor-specific antigens. Cassettes can also include MHCII antigens such a tetanus toxoid antigen and PADRE antigen, which can be considered universal class II antigens. Cassettes can also include a targeting sequence such as a ubiquitin targeting sequence. In addition, each vaccine dose can be administered to the subject in conjunction with (e.g., concurrently, before, or after) an immune modulator. Each vaccine dose can be administered to the subject in conjunction with (e.g., concurrently, before, or after) a checkpoint inhibitor (CPI). CPI's can include those that inhibit CTLA4, PD1, and/or PDL1 such as antibodies or antigen-binding portions thereof. Such antibodies can include atezolizumab, ipilimumab, nivolumamb, cemiplimab, tremelimumab or durvalumab. Each vaccine dose can be administered to the subject in conjunction with (e.g., concurrently, before, or after) a cytokine, such as IL-2, IL-7, IL-12 (including IL-12 p35, p40, p70, and/or p70-fusion constructs), IL-15, or IL-21. Each vaccine dose can be administered to the subject in conjunction with (e.g., concurrently, before, or after) a modified cytokine (e.g., pegIL-2).

[0348] A priming vaccine can be injected (e.g., intramuscularly) in a subject. Bilateral injections per dose can be used. For example, one or more injections of ChAdV68 (C68) can be used (e.g., total dose 1×10¹² viral particles); one or more injections of samRNA vectors at low vaccine dose selected from the range 0.001 to 1 ug RNA, in particular 0.1 or 1 ug can be used; or one or more injections of SAM at high vaccine dose selected from the range 1 to 1000 ug RNA, in particular 30 μg, 100 μg, or 300 μg RNA can be used. For ChAdV68 priming, 1×10¹² or less of viral particles can be administered. For ChAdV68 priming, 3×10¹¹ or less of the viral particles can be administered. For ChAdV68 priming, at least 1×10¹¹ of the viral particles can be administered. For ChAdV68 priming, between 1×10¹¹ and 1×10¹², between 3×10¹¹ and 1×10¹², or between 1×10¹¹ and 3×10¹¹ of the viral particles can be administered. For ChAdV68 priming, 1×10¹¹, 3×10¹¹, or 1×10¹² of the viral particles can be administered. For ChAdV68 priming, the viral particles can be at a concentration of at 5×10¹¹ vp/mL.

[0349] A vaccine boost (boosting vaccine) can be injected (e.g., intramuscularly) after prime vaccination. A boosting vaccine can be administered about every 1, 2, 3, 4, 5, 6, 7, 8, 9, or 10 weeks, e.g., every 4 weeks and/or 8 weeks after the prime. Bilateral injections per dose can be used. For example, one or more injections of ChAdV68 (C68) can be used (e.g., total dose 1×10¹² viral particles); one or more injections of samRNA vectors at low vaccine dose selected from the range 0.001 to 1 ug RNA, in particular 0.1 or 1 ug can be used; or one or more injections of SAM at high vaccine dose selected from the range 1 to 100 μg RNA, in particular 10 or 100 ug can be used. A SAM boost of between 10-30 μg, 10-100 μg, 10-300 μg, 30-100 μg, 30-300 μg, or 100-300 μg RNA can be administered. A SAM boost of between 10-500 μg, 10-1000 μg, 30-500 μg, 30-1000 μg, or 500-1000 μg RNA can be administered. A SAM boost of at least 400 μg, at least 500 μg, at least 600 μg, at least 700 μg, at least 800 μg, at least 900 μg, at least 1000 μg RNA can be administered. A SAM boost of 10 μg, 30 μg, 100 μg, or 300 μg RNA can be administered. A SAM boost of 300 μg RNA can be administered. A SAM boost of 100 μg RNA can be administered. A SAM boost of 30 μg RNA can be administered. A SAM boost of 10 g RNA can be administered. A SAM boost of at least 300 μg RNA can be administered. A SAM boost of at least 100 μg RNA can be administered. A SAM boost of at least 30 μg RNA can be administered. A SAM boost of at least 10 μg RNA can be administered. A SAM boost of less than or equal to 300 μg RNA can be administered.

[0350] Anti-CTLA-4 (e.g., tremelimumab) can also be administered to the subject. For example, anti-CTLA4 can be administered subcutaneously near the site of the intramuscular vaccine injection (ChAdV68 prime or samRNA low doses) to ensure drainage into the same lymph node. Tremelimumab is a selective human IgG2 mAb inhibitor of CTLA-4. Target Anti-CTLA-4 (tremelimumab) subcutaneous dose is typically 70-75 mg (in particular 75 mg) with a dose range of, e.g., 1-100 mg or 5-420 mg.

[0351] In certain instances an anti-PD-L1 antibody can be used such as durvalumab (MEDI 4736). Durvalumab is a selective, high affinity human IgG1 mAb that blocks PD-L1 binding to PD-1 and CD80. Durvalumab is generally administered at 20 mg/kg i.v. every 4 weeks.

[0352] Immune monitoring can be performed before, during, and/or after vaccine administration. Such monitoring can inform safety and efficacy, among other parameters.

[0353] To perform immune monitoring, PBMCs are commonly used. PBMCs can be isolated before prime vaccination, and after prime vaccination (e.g. 4 weeks and 8 weeks). PBMCs can be harvested just prior to boost vaccinations and after each boost vaccination (e.g. 4 weeks and 8 weeks).

[0354] Immune responses, such as T cell responses and B cell responses, can be assessed as part of an immune monitoring protocol. For example, the ability of a vaccine composition described herein to stimulate an immune response can be monitored and/or assessed. As used herein, “stimulate an immune response” refers to any increase in a immune response, such as initiating an immune response (e.g., a priming vaccine stimulating the initiation of an immune response in a naïve subject) or enhancement of an immune response (e.g., a boosting vaccine stimulating the enhancement of an immune response in a subject having a pre-existing immune response to an antigen, such as a pre-existing immune response initiated by a priming vaccine). T cell responses can be measured using one or more methods known in the art such as ELISpot, intracellular cytokine staining, cytokine secretion and cell surface capture, T cell proliferation, MHC multimer staining, or by cytotoxicity assay. T cell responses to epitopes encoded in vaccines can be monitored from PBMCs by measuring induction of cytokines, such as IFN-gamma, using an ELISpot assay. Specific CD4 or CD8 T cell responses to epitopes encoded in vaccines can be monitored from PBMCs by measuring induction of cytokines captured intracellularly or extracellularly, such as IFN-gamma, using flow cytometry. Specific CD4 or CD8 T cell responses to epitopes encoded in the vaccines can be monitored from PBMCs by measuring T cell populations expressing T cell receptors specific for epitope/MHC class I complexes using MHC multimer staining. Specific CD4 or CD8 T cell responses to epitopes encoded in the vaccines can be monitored from PBMCs by measuring the ex vivo expansion of T cell populations following 3H-thymidine, bromodeoxyuridine and carboxyfluoresceine-diacetate-succinimidylester (CFSE) incorporation. The antigen recognition capacity and lytic activity of PBMC-derived T cells that are specific for epitopes encoded in vaccines can be assessed functionally by chromium release assay or alternative colorimetric cytotoxicity assays.

[0355] B cell responses can be measured using one or more methods known in the art such as assays used to determine B cell differentiation (e.g., differentiation into plasma cells), B cell or plasma cell proliferation, B cell or plasma cell activation (e.g., upregulation of costimulatory markers such as CD80 or CD86), antibody class switching, and/or antibody production (e.g., an ELISA). Antibodies can also be assessed for function.

[0356] Disease status of a subject can be monitored following administration of any of the vaccine compositions described herein. For example, disease status may be monitored using isolated cell-free DNA (cfDNA) from a subject (also referred to as circulating tumor DNA “ctDNA”). In addition, the efficacy of a vaccine therapy may be monitored using isolated cfDNA from a subject. cfDNA monitoring can include the steps of: a. isolating or having isolated cfDNA from a subject; b. sequencing or having sequenced the isolated cfDNA; c. determining or having determined a frequency of one or more mutations in the cfDNA relative to a wild-type germline nucleic acid sequence of the subject, and d. assessing or having assessed from step (c) the status of a disease in the subject. The method can also include, following step (c) above, d. performing more than one iteration of steps (a)-(c) for the given subject and comparing the frequency of the one or more mutations determined in the more than one iterations; and f. assessing or having assessed from step (d) the status of a disease in the subject. The more than one iterations can be performed at different time points, such as a first iteration of steps (a)-(c) performed prior to administration of the vaccine composition and a second iteration of steps (a)-(c) is performed subsequent to administration of the vaccine composition. Step (c) can include comparing: the frequency of the one or more mutations determined in the more than one iterations, or the frequency of the one or more mutations determined in the first iteration to the frequency of the one or more mutations determined in the second iteration. An increase in the frequency of the one or more mutations determined in subsequent iterations or the second iteration can be assessed as disease progression. A decrease in the frequency of the one or more mutations determined in subsequent iterations or the second iteration can be assessed as a response. In some aspects, the response is a Complete Response (CR) or a Partial Response (PR). A therapy can be administered to a subject following an assessment step, such as where assessment of the frequency of the one or more mutations in the cfDNA indicates the subject has the disease. The cfDNA isolation step can use centrifugation to separate cfDNA from cells or cellular debris. cfDNA can be isolated from whole blood, such as by separating the plasma layer, buffy coat, and red bloods. cfDNA sequencing can use next generation sequencing (NGS), Sanger sequencing, duplex sequencing, whole-exome sequencing, whole-genome sequencing, de novo sequencing, phased sequencing, targeted amplicon sequencing, shotgun sequencing, or combinations thereof, and may include enriching the cfDNA for one or more polynucleotide regions of interest prior to sequencing (e.g., polynucleotides known or suspected to encode the one or more mutations, coding regions, and/or tumor exome polynucleotides). Enriching the cfDNA may include hybridizing one or more polynucleotide probes, which may be modified (e.g., biotinylated), to the one or more polynucleotide regions of interest. In general, any number of mutations may be monitored simultaneously or in parallel.

[0357] Response to treatment (i.e., therapeutic response) may be determined by radiological assessment and/or a molecular response by monitoring neoantigen ctDNA (e.g., variant allele frequency “VAF”) as described, for example, in Zhang et al. Cancer Discov. 2020; 10:1842-1853, Parikh et al. Clin Cancer Res. 2020; 26:1877-1885, and Vega et al. JCO Precision Oncology 2022; 6:e2100372 or neoantigen mutated haploid genome equivalents (mutated hGE) as described, for example, in Palmer et al. Nat. Med. 2022; 28:1619-1629 and Chabon et al. Nature 2020; 580(7802): 245-251. Molecular response may be defined as a decrease in ctDNA relative to baseline ctDNA, for example a ≥20%, ≥30%, ≥40%, ≥50%, ≥60%, ≥70%, ≥80%, ≥90%, or ≥95% decrease in ctDNA relative to baseline ctDNA. In some embodiments, molecular response is defined as ≥30% decrease in ctDNA relative to baseline ctDNA. In some embodiments, molecular response is defined as ≥30% decrease in ctDNA relative to baseline ctDNA, wherein the decrease in ctDNA occurs by 24 months, by 18 months, by 12 months, or by 6 months of treatment. In some embodiments, molecular response is defined as ≥30% decrease in ctDNA relative to baseline ctDNA, wherein the decrease in ctDNA occurs by 12 weeks, by 8 weeks, by 4 weeks, or by 2 weeks of treatment. In other embodiments, molecular response is defined as ≥50% decrease in ctDNA relative to baseline ctDNA, wherein the decrease in ctDNA occurs by 24 months, by 18 months, by 12 months, or by 6 months of treatment. In other embodiments, molecular response is defined as ≥50% decrease in ctDNA relative to baseline ctDNA. In some embodiments, molecular response is defined as ≥50% decrease in ctDNA relative to baseline ctDNA, wherein the decrease in ctDNA occurs by 12 weeks, by 8 weeks, by 4 weeks, or by 2 weeks of treatment. Molecular response may be observed during early on-treatment radiological stable disease (SD) and/or in patients with radiological progressive disease (PD).

### VIII. Antigen Identification

### VIII.A. Antigen Candidate Identification

[0358] Research methods for NGS analysis of tumor and normal exome and transcriptomes have been described and applied in the antigen identification space.^{6, 14, 15} Certain optimizations for greater sensitivity and specificity for antigen identification in the clinical setting can be considered. These optimizations can be grouped into two areas, those related to laboratory processes and those related to the NGS data analysis. Examples of optimizations are known to those skilled in the art, for example the methods described in more detail in international patent application publications WO/2017/106638, WO/2018/195357, and WO/2018/208856, each herein incorporated by reference, in their entirety, for all purposes.

### VIII.B. Isolation and Detection of HLA Peptides

[0359] Isolation of HLA-peptide molecules was performed using classic immunoprecipitation (IP) methods after lysis and solubilization of the tissue sample (55-58). A clarified lysate was used for HLA specific IP.

[0360] Immunoprecipitation was performed using antibodies coupled to beads where the antibody is specific for HLA molecules. For a pan-Class I HLA immunoprecipitation, a pan-Class I CR antibody is used, for Class II HLA-DR, an HLA-DR antibody is used. Antibody is covalently attached to NHS-sepharose beads during overnight incubation. After covalent attachment, the beads were washed and aliquoted for IP. (59, 60) Immunoprecipitations can also be performed with antibodies that are not covalently attached to beads. Typically this is done using sepharose or magnetic beads coated with Protein A and/or Protein G to hold the antibody to the column. Some antibodies that can be used to selectively enrich MHC/peptide complex are listed below.

| Antibody Name | Specificity |
|---|---|
| W6/32 | Class I HLA-A, B, C |
| L243 | Class II - HLA-DR |
| Tu36 | Class II - HLA-DR |
| LN3 | Class II - HLA-DR |
| Tu39 | Class II - HLA-DR, DP, DQ |
| SPVL3 | Class II - HLA - DQ |
| B7/21 | Class II - HLA - DP |

[0361] The clarified tissue lysate is added to the antibody beads for the immunoprecipitation. After immunoprecipitation, the beads are removed from the lysate and the lysate stored for additional experiments, including additional IPs. The IP beads are washed to remove non-specific binding and the HLA/peptide complex is eluted from the beads using standard techniques. The protein components are removed from the peptides using a molecular weight spin column or C18 fractionation. The resultant peptides are taken to dryness by SpeedVac evaporation and in some instances are stored at −20C prior to MS analysis. HLA IPs can also be performed in 96well plate format using plates that contain filter bottoms. Use of the plates allows for multiple IPs to be performed in tandem.

[0362] Dried peptides are reconstituted in an HPLC buffer suitable for reverse phase chromatography and loaded onto a C-18 microcapillary HPLC column for gradient elution in a Fusion Lumos mass spectrometer (Thermo). MS1 spectra of peptide mass/charge (m/z) were collected in the Orbitrap detector at high resolution followed by MS2 low resolution scans collected in the ion trap detector after HCD fragmentation of the selected ion. Additionally, MS2 spectra can be obtained using either CID or ETD fragmentation methods or any combination of the three techniques to attain greater amino acid coverage of the peptide. MS2 spectra can also be measured with high resolution mass accuracy in the Orbitrap detector with targeted method known as parallel reaction monitoring. In targeted PRM, specific peptide precursor ions are isolated in the Orbitrap detector and all resulting HCD fragmentation ions are scanned across the elution of the peptide peak. This enables both peptide identification and quantitation of endogenous peptide in the presence of a co-injected stabile isotopically labeled peptide standard.

[0363] MS2 spectra from each analysis are searched against a protein database using Comet (61, 62) and the peptide identification are scored using Percolator (63-65). Additional sequencing is performed using PEAKS studio (Bioinformatics Solutions Inc.) and other search engines or sequencing methods can be used including spectral matching and de novo sequencing (97).

### VIII.B.1. MS Limit of Detection Studies in Support of Comprehensive HLA Peptide Sequencing.

[0364] Using the peptide YVYVADVAAK (SEQ ID NO: 29364) it was determined what the limits of detection are using different amounts of peptide loaded onto the LC column. The amounts of peptide tested were 1 pmol, 100 fmol, 10 fmol, 1 fmol, and 100 amol. (Table 1) These results indicate that the lowest limit of detection (LoD) is in the attomol range (10⁻¹⁸), that the dynamic range spans five orders of magnitude, and that the signal to noise appears sufficient for sequencing at low femtomol ranges (10⁻¹⁵).

TABLE 1

| | | |
|---|---|---|
| Peptide m/z | Loaded on Column | Copies/Cell in 1e9cells |

| | | | |
|---|---|---|---|
| 566.830 | 1 | pmol | 600 |
| 562.823 | 100 | fmol | 60 |
| 559.816 | 10 | fmol | 6 |
| 556.810 | 1 | fmol | 0.6 |
| 553.802 | 100 | amol | 0.06 |

### IX. Presentation Model

[0365] Presentation models can be used to identify likelihoods of peptide presentation in patients. Various presentation models are known to those skilled in the art, for example the presentation models described in more detail in U.S. Pat. No. 10,055,540, US Application Pub. No. US20200010849A1 and US20110293637, and international patent application publications WO/2018/195357, WO/2018/208856, and WO2016187508, each herein incorporated by reference, in their entirety, for all purposes.

### X. Training Module

[0366] Training modules can be used to construct one or more presentation models based on training data sets that generate likelihoods of whether peptide sequences will be presented by MHC alleles associated with the peptide sequences. Various training modules are known to those skilled in the art, for example the presentation models described in more detail in U.S. Pat. No. 10,055,540, US Application Pub. No. US20200010849A1, and international patent application publications WO/2018/195357 and WO/2018/208856, each herein incorporated by reference, in their entirety, for all purposes. A training module can construct a presentation model to predict presentation likelihoods of peptides on a per-allele basis. A training module can also construct a presentation model to predict presentation likelihoods of peptides in a multiple-allele setting where two or more MHC alleles are present.

### XI. Prediction Module

[0367] A prediction module can be used to receive sequence data and select candidate antigens in the sequence data using a presentation model. Specifically, the sequence data may be DNA sequences, RNA sequences, and/or protein sequences extracted from tumor tissue cells of patients. A prediction module may identify candidate neoantigens that are mutated peptide sequences by comparing sequence data extracted from normal tissue cells of a patient with the sequence data extracted from tumor tissue cells of the patient to identify portions containing one or more mutations. A prediction module may identify candidate antigens that have altered expression in a tumor cell or cancerous tissue in comparison to a normal cell or tissue by comparing sequence data extracted from normal tissue cells of a patient with the sequence data extracted from tumor tissue cells of the patient to identify improperly expressed candidate antigens.

[0368] A presentation module can apply one or more presentation model to processed peptide sequences to estimate presentation likelihoods of the peptide sequences. Specifically, the prediction module may select one or more candidate antigen peptide sequences that are likely to be presented on tumor HLA molecules by applying presentation models to the candidate antigens. In one implementation, the presentation module selects candidate antigen sequences that have estimated presentation likelihoods above a predetermined threshold. In another implementation, the presentation model selects the N candidate antigen sequences that have the highest estimated presentation likelihoods (where N is generally the maximum number of epitopes that can be delivered in a vaccine). A vaccine including the selected candidate antigens for a given patient can be injected into a subject to stimulate immune responses.

### XI.B. Cassette Design Module

### XI.B.1 Overview

[0369] A cassette design module can be used to generate a vaccine cassette sequence based on selected candidate peptides for injection into a patient. Various cassette design modules are known to those skilled in the art, for example the cassette design modules described in more detail in U.S. Pat. No. 10,055,540, US Application Pub. No. US20200010849A1, and international patent application publications WO/2018/195357, and WO/2018/208856, each herein incorporated by reference, in their entirety, for all purposes.

[0370] A set of therapeutic epitopes may be generated based on the selected peptides determined by a prediction module associated with presentation likelihoods above a predetermined threshold, where the presentation likelihoods are determined by the presentation models. However it is appreciated that in other embodiments, the set of therapeutic epitopes may be generated based on any one or more of a number of methods (alone or in combination), for example, based on binding affinity or predicted binding affinity to HLA class I or class II alleles of the patient, binding stability or predicted binding stability to HLA class I or class II alleles of the patient, random sampling, and the like.

[0371] Therapeutic epitopes may correspond to selected peptides themselves. Therapeutic epitopes may also include C- and/or N-terminal flanking sequences in addition to the selected peptides. N- and C-terminal flanking sequences can be the native N- and C-terminal flanking sequences of the therapeutic vaccine epitope in the context of its source protein. Therapeutic epitopes can represent a fixed-length epitope Therapeutic epitopes can represent a variable-length epitope, in which the length of the epitope can be varied depending on, for example, the length of the C- or N-flanking sequence. For example, the C-terminal flanking sequence and the N-terminal flanking sequence can each have varying lengths of 2-5 residues, resulting in 16 possible choices for the epitope.

[0372] A cassette design module can also generate cassette sequences by taking into account presentation of junction epitopes that span the junction between a pair of therapeutic epitopes in the cassette. Junction epitopes are novel non-self but irrelevant epitope sequences that arise in the cassette due to the process of concatenating therapeutic epitopes and linker sequences in the cassette. The novel sequences of junction epitopes are different from the therapeutic epitopes of the cassette themselves.

[0373] A cassette design module can generate a cassette sequence that reduces the likelihood that junction epitopes are presented in the patient. Specifically, when the cassette is injected into the patient, junction epitopes have the potential to be presented by HLA class I or HLA class II alleles of the patient, and stimulate a CD8 or CD4 T-cell response, respectively. Such reactions are often times undesirable because T-cells reactive to the junction epitopes have no therapeutic benefit, and may diminish the immune response to the selected therapeutic epitopes in the cassette by antigenic competition.⁷⁶

[0374] A cassette design module can iterate through one or more candidate cassettes, and determine a cassette sequence for which a presentation score of junction epitopes associated with that cassette sequence is below a numerical threshold. The junction epitope presentation score is a quantity associated with presentation likelihoods of the junction epitopes in the cassette, and a higher value of the junction epitope presentation score indicates a higher likelihood that junction epitopes of the cassette will be presented by HLA class I or HLA class II or both.

[0375] In one embodiment, a cassette design module may determine a cassette sequence associated with the lowest junction epitope presentation score among the candidate cassette sequences.

[0376] A cassette design module may iterate through one or more candidate cassette sequences, determine the junction epitope presentation score for the candidate cassettes, and identify an optimal cassette sequence associated with a junction epitope presentation score below the threshold.

[0377] A cassette design module may further check the one or more candidate cassette sequences to identify if any of the junction epitopes in the candidate cassette sequences are self-epitopes for a given patient for whom the vaccine is being designed. To accomplish this, the cassette design module checks the junction epitopes against a known database such as BLAST. In one embodiment, the cassette design module may be configured to design cassettes that avoid junction self-epitopes.

[0378] A cassette design module can perform a brute force approach and iterate through all or most possible candidate cassette sequences to select the sequence with the smallest junction epitope presentation score. However, the number of such candidate cassettes can be prohibitively large as the capacity of the vaccine increases. For example, for a vaccine capacity of 20 epitopes, the cassette design module has to iterate through ˜10¹⁸ possible candidate cassettes to determine the cassette with the lowest junction epitope presentation score. This determination may be computationally burdensome (in terms of computational processing resources required), and sometimes intractable, for the cassette design module to complete within a reasonable amount of time to generate the vaccine for the patient. Moreover, accounting for the possible junction epitopes for each candidate cassette can be even more burdensome. Thus, a cassette design module may select a cassette sequence based on ways of iterating through a number of candidate cassette sequences that are significantly smaller than the number of candidate cassette sequences for the brute force approach.

[0379] A cassette design module can generate a subset of randomly or at least pseudo-randomly generated candidate cassettes, and selects the candidate cassette associated with a junction epitope presentation score below a predetermined threshold as the cassette sequence. Additionally, the cassette design module may select the candidate cassette from the subset with the lowest junction epitope presentation score as the cassette sequence. For example, the cassette design module may generate a subset of ˜1 million candidate cassettes for a set of 20 selected epitopes, and select the candidate cassette with the smallest junction epitope presentation score. Although generating a subset of random cassette sequences and selecting a cassette sequence with a low junction epitope presentation score out of the subset may be suboptimal relative to the brute force approach, it requires significantly less computational resources thereby making its implementation technically feasible. Further, performing the brute force method as opposed to this more efficient technique may only result in a minor or even negligible improvement in junction epitope presentation score, thus making it not worthwhile from a resource allocation perspective. A cassette design module can determine an improved cassette configuration by formulating the epitope sequence for the cassette as an asymmetric traveling salesman problem (TSP). Given a list of nodes and distances between each pair of nodes, the TSP determines a sequence of nodes associated with the shortest total distance to visit each node exactly once and return to the original node. For example, given cities A, B, and C with known distances between each other, the solution of the TSP generates a closed sequence of cities, for which the total distance traveled to visit each city exactly once is the smallest among possible routes. The asymmetric version of the TSP determines the optimal sequence of nodes when the distance between a pair of nodes are asymmetric. For example, the “distance” for traveling from node A to node B may be different from the “distance” for traveling from node B to node A. By solving for an improved optimal cassette using an asymmetric TSP, the cassette design module can find a cassette sequence that results in a reduced presentation score across the junctions between epitopes of the cassette. The solution of the asymmetric TSP indicates a sequence of therapeutic epitopes that correspond to the order in which the epitopes should be concatenated in a cassette to minimize the junction epitope presentation score across the junctions of the cassette. A cassette sequence determined through this approach can result in a sequence with significantly less presentation of junction epitopes while potentially requiring significantly less computational resources than the random sampling approach, especially when the number of generated candidate cassette sequences is large. Illustrative examples of different computational approaches and comparisons for optimizing cassette design are described in more detail in U.S. Pat. No. 10,055,540, US Application Pub. No. US20200010849A1, and international patent application publications WO/2018/195357 and WO/2018/208856, each herein incorporated by reference, in their entirety, for all purposes.

### XI.B.2 Shared Antigen Vaccine Sequence Selection

[0380] Shared antigen sequences for inclusion in a shared antigen vaccine and appropriate patients for treatment with such vaccine can be chosen by one of skill in the art using the detailed disclosure provided herein. For example, Tables: A, 1.2, Additional MS Validated Neoantigens, or AACR GENIE Results can be used for sequence selection. In certain instances a particular mutation and HLA allele combination can be preferred (e.g., based on sequencing data available from a given subject indicating that each are present in the subject) and subsequently used in combination together to identify a shared neoantigen sequence using Table A, Additional MS Validated Neoantigens, or AACR GENIE Results for inclusion in a vaccine.

### XIII. Example Computer

[0381] A computer can be used for any of the computational methods described herein. One skilled in the art will recognize a computer can have different architectures. Examples of computers are known to those skilled in the art, for example the computers described in more detail U.S. Pat. No. 10,055,540, US Application Pub. No. US20200010849A1, and in international patent application publications WO/2017/106638, WO/2018/195357, and WO/2018/208856, each herein incorporated by reference, in their entirety, for all purposes.

### XIV. Clinical Assessment of a Neoantigen Vaccine in Adjuvant and Maintenance Therapies

[0382] Personalized cancer vaccines encoding neoepitope cassettes (as described throughout) is administered in combination with immune checkpoint blockade in patients with advanced cancer. The heterologous prime/boost vaccine regimen involves (1) a ChAdV that is used as a prime vaccination and (2) a SAM formulated in a LNP that is used for boost vaccinations following the ChAdV vector. Both the ChAdV and SAM vectors encode the same personalized neoepitope cassette specific for each subject, which also encodes two universal CD4 T-cell epitopes (PADRE and Tetanus Toxoid). For subject inclusion, tumors are used for whole-exome and transcriptome sequencing to detect somatic mutations, and blood is used for HLA typing.

[0383] The ChAdV vector is a replication-defective, E1, E3, E4 open reading frames 2-4 (ORF2-4) deleted adenoviral vector based on chimpanzee adenovirus 68 (C68, 68/SAdV-25, originally designated as Pan 9), which is a subgroup E adenovirus [ChAdV68-Empty-E4deleted; see SEQ ID NO:29365 which represents SEQ ID NO:1 with an E1 deletion (577 to 3403), E3 deletion (27,125-31,825), and a partial E4 deletion spanning ORF2-4 (34,916 to 35,642)]. The ChAdV vector is formulated in solution at 5×10¹¹ vp/mL and 1.0 mL is injected IM at each of 2 bilateral vaccine injection sites in opposing deltoid muscles (deltoid muscle preferred, gluteus [dorso or ventro] or rectus femoris on each side may be used).

[0384] The SAM vector (GRT-R902) is derived from an alphavirus. The SAM vector encodes the viral proteins and the 5′ and 3′ RNA sequences required for RNA amplification but encoded no structural proteins. The SAM vector is formulated in LNPs composed of 4 lipids: an ionizable amino lipid, a phosphatidylcholine, cholesterol, and a PEG-based coat lipid to encapsulate the SAM and form LNPs. The SAM vector contains the same neoantigen expression cassette as used in the ChAdV vector. The SAM vector is formulated in solution at 1 mg/mL and was injected IM at each of 2 bilateral vaccine injection sites in opposing deltoid muscles (deltoid muscle preferred, gluteus [dorso or ventro] or rectus femoris on each side may be used). The boost vaccination sites is as close to the prime vaccination site as possible. The injection volume is based on the dose to be administered. A dose level amount refers explicitly to the amount of the SAM vector, i.e., it does not refer to other components, such as the LNP. The ratio of LNP:SAM is approximately 24:1.

[0385] Ipilimumab is a human monoclonal IgGI antibody that binds to the cytotoxic T-lymphocyte associated antigen 4 (CTLA-4). Ipilimumab is formulated in solution at 5 mg/mL and is injected SC proximally (within ˜2 cm) to each of the bilateral vaccination sites. The SC route of ipilimumab is distinct from the approved IV route of administration. Ipilimumab is administered at a dose of 30 mg in one of two methods listed below:
[0386] 1. Four 1.5 mL (7.5 mg) injections proximal to the vaccine draining LN at each of the bilateral vaccination sites (i.e., 1.5 mL below the vaccination site and 1.5 mL above the vaccination site on each bilateral side in each deltoid, ventrogluteal, dorsogluteal, or rectus femoris [deltoid preferred, but dependent on clinical site and patient preference]).
[0387] 2. Six 1 mL (5 mg) injections proximal to the vaccine draining LN at each of the bilateral vaccination sites (i.e., 1 mL below the vaccination site, 1 mL to the side of the vaccination site, and 1 mL above the vaccination site on each bilateral side in each deltoid, ventrogluteal, dorsogluteal, or rectus femoris [deltoid preferred, but dependent on clinical site and patient preference]).

[0388] Nivolumab is a human monoclonal IgG4 antibody that blocks the interaction of PD-1 and its ligands, PD-L1 and PD-L2. Nivolumab is formulated in solution at 10 mg/mL and is administered as an IV infusion through a 0.2-micron to 1.2-micron pore size, low-protein binding in-line filter at the protocol-specified doses. It is not administered as an IV push or bolus injection. When the dose is fixed (e.g., 240 mg flat dose), nivolumab injection may be infused undiluted or diluted so as not to exceed a total infusion volume of 160 mL. Nivolumab infusion is promptly followed by a flush of diluent to clear the line. Nivolumab is administered following each vaccination (i.e., each of the SAM or ChAdV vaccines) with or without ipilimumab on the same day. The dose and route of nivolumab is based on the Food and Drug Administration approved dose and route. Doses of nivolumab may be interrupted, delayed, or discontinued depending on how well the participant tolerates the treatment. Dosing visits are not skipped, only delayed. Vaccination does not occur in the absence of nivolumab unless the Investigator and Sponsor believe treatment with SAM vectors in the absence of nivolumab is in the best interest of the patient. Atezolizumab or cemiplimab may be administered in place of nivolumab, e.g., according to manufacturer's directions and/or appropriate dosing determined as recognized by one skilled in the art. Other PD1 and/or PD-L1 checkpoint inhibitors may alternatively be used. For example, atezolizumab can be administered via intravenous infusion at a dose of 1680 mg once every 4 weeks.

[0389] A Phase 2 study is preformed to characterize the clinical activity of maintenance therapy with GRT-C901/GRT-R902 in combination with checkpoint inhibitors in addition to fluoropyrimidine/bevacizumab versus fluoropyrimidine/bevacizumab alone as assessed by changes in circulating tumor (ct) DNA. A Phase 3 study is performed to demonstrate clinical efficacy of the regime as assessed by progression-free survival. Tumors harboring non-synonymous deoxyribonucleic acid (DNA) mutations can present peptides containing these mutations as non-self antigens in the context of human leukocyte antigens (HLAs) on the tumor cell surface. A fraction of mutated peptides result in neoantigens capable of generating T-cell responses that exclusively target tumor cells. Sensitive detection of these mutations allows for the identification of neoantigens unique to each patient's tumor to be included in a personalized cancer vaccine that targets these neoantigens. This vaccine regimen uses two vaccine vectors as a heterologous prime/boost approach (GRT-C901 first followed by GRT-R902) to stimulate an immune response. The studies explore the anti-tumor activity of this patient-specific immunotherapy in combination with checkpoint inhibitors in addition to fluoropyrimidine/bevacizumab. The study arms are shown in Table 2. Schematics illustrating maintenance and adjuvant therapies are shown in FIG. 1 and FIG. 2, respectively.

[0390] There are two stages to the study. In the vaccine production stage, while patients receive FOLFOX/bev induction therapy, neoantigen prediction is performed using a tumor biopsy and Gritstone's EDGE™ neoantigen prediction model. For patients randomized to the vaccine arm the top 20 predicted neoantigens are included in the vaccine vectors. After completing oxaliplatin, patients will enter the study treatment stage. Patients in the control arm will continue with maintenance therapy whereas patients in the vaccine arm will add the vaccine regimen to maintenance therapy. The vaccine regimen consists of GRT-C901/GRT-R902 as well as SC ipilimumab (30 mg) and IV atezolizumab (1680 mg). Over the first year of treatment, 6 vaccinations will occur. Ipilimumab will be administered SC with the first doses of GRT-C901 and GRT-R902. Atezolizumab will be administered every 4 weeks for up to 2 years.

### Inclusion Criteria:

[0391] Patients with histologically confirmed metastatic colorectal cancer (CRC) who are planned for, or have received no more than 1 cycle of first-line treatment in the metastatic setting with a fluoropyrimidine and oxaliplatin in combination with bevacizumab
[0392] Measurable and unresectable disease according to RECIST v1.1
[0393] Availability of formalin-fixed paraffin-embedded (FFPE) tumor specimens.
[0394] Eastern Cooperative Oncology Group (ECOG) performance status of 0 or 1 or equivalent for patients 12 to 17 years of age
[0395] Patient has adequate organ function in opinion of investigator
[0396] If women of childbearing potential (WCBP), must be willing to undergo pregnancy testing and agrees to the use at least 1 highly effective contraceptive method during the study treatment period and for 5 months after last investigational study treatment.

### Exclusion Criteria:

[0397] Patients with microsatellite instability-high disease
[0398] Patient has a known tumor mutation burden <1 non-synonymous mutations/megabase
[0399] Known DNA Polymerase Epsilon mutations
[0400] Patients with known BRAFV600E mutations
[0401] Bleeding disorder or history of significant bruising or bleeding following IM injections or blood draws
[0402] Immunosuppression anticipated at time of study treatment
[0403] History of allogeneic tissue/solid organ transplant
[0404] Active or history of autoimmune disease or immune deficiency
[0405] Patient with symptomatic or actively progressing central nervous system (CNS) metastases, carcinomatous meningitis, or has been treated with whole brain radiation
[0406] History of other cancer within 2 years with the exception of neoplasm that has undergone potentially curative therapy
[0407] Any severe concurrent non-cancer disease that, in the judgment of the Investigator, would make the patient inappropriate for the current study
[0408] Active tuberculosis or recent (<2 weeks) clinically significant infection, evidence of active hepatitis B or hepatitis C, or known history of positive test for HIV
[0409] History of pneumonitis requiring systemic steroids for treatment (with the exception of prior resolved in-field radiation pneumonitis)
[0410] Myocardial infarction within previous 3 months or prior to study treatment, unstable angina, serious uncontrolled cardiac arrhythmia, history of myocarditis, or congestive heart failure
[0411] Pregnant, planning to become pregnant, or nursing.

TABLE 2
Arms and Interventions

| Arms | Assigned Interventions |
|---|---|
| Experimental: Vaccine Arm | Drug: GRT-C901 |
| After receiving up to 24 weeks induction | A patient-specific neoantigen cancer vaccine |
| therapy with fluoropyrimidine/oxaliplatin/ | administered via intramuscular (IM) injection as |
| bevacizumab standard of care and undergoing | prime and single boost. |
| vaccine production screening, patients will | Drug: GRT-R902 |
| receive a total of 6 administrations of GRT- | A patient-specific neoantigen cancer vaccine boost, |
| C901/GRT-R902 plus ipilimumab co- | administered via IM injection. |
| administered only with the first dose of GRT- | Drug: Atezolizumab |
| C901 and GRT-R902. All patients will receive | Atezolizumab is administered via intravenous |
| atezolizumab in addition to maintenance | infusion at a dose of 1680 mg once every 4 weeks. |
| therapy of fluoropyrimidine and bevacizumab | Other Names: Tecentriq |
| according to standard of care. | Drug: Ipilimumab |
| | Ipilimumab is administered via subcutaneous |
| | injection at a dose of 30 mg with the first dose of |
| | GRT- C901 and GRT-R902. |
| | Other Names: Yervoy |
| | Drug: Fluoropyrimidine |
| | Fluoropyrimidine is administered as maintenance |
| | therapy per standard of care. |
| | Drug: Bevacizumab |
| | Bevacizumab is administered as maintenance therapy |
| | per standard of care. |
| | Other Names: Avastin |
| | Drug: Oxaliplatin |
| | Oxaliplatin is administered as induction therapy per |
| | standard of care. |
| | Other Names: Eloxatin |
| Active Comparator: Control Arm | Drug: Fluoropyrimidine |
| After receiving up to 24 weeks induction | Fluoropyrimidine administered as maintenance |
| therapy with fluoropyrimidine/oxaliplatin/ | therapy per standard of care. |
| bevacizumab standard of care and undergoing | Drug: Bevacizumab |
| vaccine production screening, patients will | Bevacizumab administered as maintenance therapy |
| receive maintenance therapy of | per standard of care. |
| fluoropyrimidine and bevacizumab according | Other Names: Eloxatin |
| to standard of care. | |

### XV. Clinical Assessment of a Neoantigen Vaccine in Combination with Immune Checkpoint Blockade for Patients with Colon Cancer

[0412] Tumors harboring non-synonymous deoxyribonucleic acid (DNA) mutations present peptides containing these mutations as non-self antigens in the context of human leukocyte antigens (HLAs) on the tumor cell surface. A fraction of mutated peptides result in neoantigens capable of generating T cell responses that exclusively target tumor cells. Sensitive detection of these mutations allows for the identification of neoantigens unique to each patient's tumor to be included in a personalized cancer vaccine that targets these neoantigens.

[0413] A vaccine regimen using two vaccine vectors as a heterologous prime/boost approach (GRT-C901 as prime and GRT-R902 as boost) to stimulate an immune response is assessed. The study explores the anti-tumor activity of this patient specific immunotherapy in combination with checkpoint inhibitors. The study assesses and characterizes the antitumor activity of adjuvant treatment with the vaccine regimen (GRT-C901/GRT-R902), commonly referred to as GRANITE, in combination with checkpoint inhibitors based on molecular response and to assess the safety and tolerability of GRT-C901/GRT-R902 in combination with checkpoint blockade in patients with colon cancer who are circulating tumor deoxyribonucleic acid (ctDNA) positive following surgical resection.

[0414] Personalized cancer vaccines encoding neoepitope cassettes (as described throughout) are administered in combination with immune checkpoint blockade in patients with advanced cancer. The heterologous prime/boost vaccine regimen involves (1) a ChAdV that is used as a prime vaccination and (2) a SAM formulated in a LNP that is used for boost vaccinations following the ChAdV vector. Both the ChAdV and SAM vectors encode the same personalized neoepitope cassette specific for each subject, which also encodes two universal CD4 T-cell epitopes (PADRE and Tetanus Toxoid). For subject inclusion, tumors are used for whole-exome and transcriptome sequencing to detect somatic mutations, and blood is used for HLA typing.

[0415] The ChAdV vector is a replication-defective, E1, E3, E4 open reading frames 2-4 (ORF2-4) deleted adenoviral vector based on chimpanzee adenovirus 68 (C68, 68/SAdV-25, originally designated as Pan 9), which is a subgroup E adenovirus [ChAdV68-Empty-E4deleted; see SEQ ID NO:29365 which represents SEQ ID NO:1 with an E1 deletion (577 to 3403), E3 deletion (27,125-31,825), and a partial E4 deletion spanning ORF2-4 (34,916 to 35,642)]. The ChAdV vector is formulated in solution at 5×10¹¹ vp/mL and 1.0 mL is injected IM at each of 2 bilateral vaccine injection sites in opposing deltoid muscles (deltoid muscle preferred, gluteus [dorso or ventro] or rectus femoris on each side may be used).

[0416] The SAM vector (GRT-R902) is derived from an alphavirus. The SAM vector encodes the viral proteins and the 5′ and 3′ RNA sequences required for RNA amplification but encoded no structural proteins. The SAM vector is formulated in LNPs composed of 4 lipids: an ionizable amino lipid, a phosphatidylcholine, cholesterol, and a PEG-based coat lipid to encapsulate the SAM and form LNPs. The SAM vector contains the same neoantigen expression cassette as used in the ChAdV vector. The SAM vector is formulated in solution at 1 mg/mL and was injected IM at each of 2 bilateral vaccine injection sites in opposing deltoid muscles (deltoid muscle preferred, gluteus [dorso or ventro] or rectus femoris on each side may be used). The boost vaccination sites is as close to the prime vaccination site as possible. The injection volume is based on the dose to be administered. A dose level amount refers explicitly to the amount of the SAM vector, i.e., it does not refer to other components, such as the LNP. The ratio of LNP:SAM is approximately 24:1.

[0417] Ipilimumab is a human monoclonal IgGI antibody that binds to the cytotoxic T-lymphocyte associated antigen 4 (CTLA-4). Ipilimumab is formulated in solution at 5 mg/mL and is injected SC proximally (within ˜2 cm) to each of the bilateral vaccination sites. The SC route of ipilimumab is distinct from the approved IV route of administration. Ipilimumab is administered at a dose of 30 mg in one of two methods listed below:
[0418] 1. Four 1.5 mL (7.5 mg) injections proximal to the vaccine draining LN at each of the bilateral vaccination sites (i.e., 1.5 mL below the vaccination site and 1.5 mL above the vaccination site on each bilateral side in each deltoid, ventrogluteal, dorsogluteal, or rectus femoris [deltoid preferred, but dependent on clinical site and patient preference]).
[0419] 2. Six 1 mL (5 mg) injections proximal to the vaccine draining LN at each of the bilateral vaccination sites (i.e., 1 mL below the vaccination site, 1 mL to the side of the vaccination site, and 1 mL above the vaccination site on each bilateral side in each deltoid, ventrogluteal, dorsogluteal, or rectus femoris [deltoid preferred, but dependent on clinical site and patient preference]).

[0420] Nivolumab is a human monoclonal IgG4 antibody that blocks the interaction of PD-1 and its ligands, PD-L1 and PD-L2. Nivolumab is formulated in solution at 10 mg/mL and is administered as an IV infusion through a 0.2-micron to 1.2-micron pore size, low-protein binding in-line filter at the protocol-specified doses. It is not administered as an IV push or bolus injection. When the dose is fixed (e.g., 240 mg flat dose), nivolumab injection may be infused undiluted or diluted so as not to exceed a total infusion volume of 160 mL. Nivolumab infusion is promptly followed by a flush of diluent to clear the line. Nivolumab is administered following each vaccination (i.e., each of the SAM or ChAdV vaccines) with or without ipilimumab on the same day. The dose and route of nivolumab is based on the Food and Drug Administration approved dose and route. Doses of nivolumab may be interrupted, delayed, or discontinued depending on how well the participant tolerates the treatment. Dosing visits are not skipped, only delayed. Vaccination does not occur in the absence of nivolumab unless the Investigator and Sponsor believe treatment with SAM vectors in the absence of nivolumab is in the best interest of the patient. Atezolizumab or cemiplimab may be administered in place of nivolumab, e.g., according to manufacturer's directions and/or appropriate dosing determined as recognized by one skilled in the art. Other PD1 and/or PD-L1 checkpoint inhibitors may alternatively be used. For example, atezolizumab can be administered via intravenous infusion at a dose of 1680 mg once every 4 weeks.

[0421] A Phase 2 study is preformed to characterize the clinical activity of adjuvant chemotherapy with GRT-C901/GRT-R902 in combination with checkpoint inhibitors. The study arms are shown in Table 3.

[0422] Patients with CRC, gastric, or lung cancer who had received routine chemotherapy were treated in a Phase 1/2 first-in-human study, as shown in Table 3. The vaccine regimen included sequential chimpanzee adenovirus and self-amplifying mRNA vectors containing 20 patient-specific neoantigens in combination with nivolumab (IV 480 mg Q4W) and ipilimumab (SC 30 mg), see Table 3.

[0423] Thirteen of 29 patients treated had CRC. Six of 13 had stable disease (SD) and 7 had progressive disease (PD) per RECIST v1.1. Six patients achieved a molecular response (MR) defined as ≥−30% reduction in ctDNA. Patients with a molecular response had prolonged overall survival (OS) compared to patients without a MR (see Table 4). Patients with a molecular response did not favor primary tumor location, liver metastases, KRAS mutations, were not enriched for higher tumor mutation burden (TMB), PD-L1, or T cell inflamed gene expression profiles (GEP), and had similar baseline ctDNA values (p-value=0.18) (see Table 4).

TABLE 4
Clinical Response in CRC Subjects

| | | | | Median | | | | |
|---|---|---|---|---|---|---|---|---|
| | | | | TMB | | | Baseline | |
| | Overall | | | (mutations | | | ctDNA | |
| | Survival | Primary | | per | | T cell inflamed GEP | (mean | SD per |
| | (median in | Tumor | Liver | megabase, | | based on RNAseq | VAF, | RECIST |
| | months) | Location | lesions | range) | PD-L1 | (z-score) | range) | v1.1 |
| MR | Median: NR | Colon: 2 | 4 | 2.9 | <1%: 4 | IFNg: −0.18 (−0.44-2.69) | 3.2% | 5 |
| (n = 6) | 12-mo: 67% | Rectum: 3 | | (2.1-6.6) | NE: 2 | CD8A: 635 (390-1113) | (0.2-10.4) | |
| | | Both: 1 | | | | CXCL9: 100 (12-4402) | | |
| No MR | Median: 7.8 | Colon: 5 | 6 | 3.6 | <1%: 5 | IFNg: −0.32 (−0.56-0.46) | 6.4% | 1 |
| (n = 7) | 12-mo: 0% | Rectum: 1 | | (2.5-17.6) | NE: 2 | CD8A: 582 (241-1901) | (0.0-17.4) | |
| | | Both: 1 | | | | CXCL9: 176 (25-436) | | |

### Primary Outcome Measure:

[0424] 1. Percentage of patients with a ≥50% decrease from baseline in circulating tumor deoxyribonucleic acid (ctDNA) [Time Frame: Baseline and up to ˜24 months]
[0425] 2. Incidence of adverse events (AEs), immune-related AEs, treatment-related AEs, serious AEs, AEs leading to death, AEs leading to dose delays, and AEs leading to discontinuation of study treatment using National Cancer Institute (NCI) Common Terminology [Time Frame: Up to ˜100 days after last study treatment (Up to 62 weeks)]

### Secondary Outcome Measure:

[0426] 3. Recurrence-free survival (RFS) per Response Evaluation Criteria in Solid Tumors (RECIST) v1.1 as assessed by investigator [Time Frame: From time of randomization until first recurrence of the same cancer, or death (Up to ˜72 months)]
[0427] 4. Disease-free survival (DFS) [Time Frame: From time of randomization until first recurrence of any cancer, or death (Up to ˜72 months)]
[0428] 5. Overall Survival (OS) [Time Frame: Up to ˜72 months]
[0429] 6. Conversion of patients with ctDNA at baseline to undetectable ctDNA as assessed via a polymerase chain reaction (PCR)-based assay [Time Frame: Baseline and up to ˜24 months]
[0430] 7. Longest duration of molecular response of ctDNA decrease from baseline [Time Frame: Baseline and up to ˜24 months]
[0431] 8. Success of Vaccine Manufacture; Vaccine manufacture success measured by the number of patients having sufficient neoantigens identified to warrant vaccine production. [Time Frame: Up to 28 days before Day 1 of study drug administration]
[0432] 9. T-cell response using peripheral blood mononuclear cells (PBMCs) [Time Frame: Up to ˜24 months]

### Inclusion Criteria for Vaccine Production Stage:

[0433] Patients with a high-risk stage II or stage III colon cancer, including high-risk stage II colon cancer defined as meeting any of the following criteria: T4 tumors, Grade ≥3, clinical presentation with bowel obstruction or perforation, histological signs of vascular or lymphatic or perineural invasions, and <12 nodes examined
[0434] Patient has evidence of minimal residual disease (MRD) prior to initiating adjuvant chemotherapy (ACT) based on the presence of ctDNA
[0435] Patient has received approximately <6 weeks of ACT.
[0436] Margin negative (RO) pathology on resection
[0437] Availability of formalin fixed, paraffin embedded (FFPE) tumor specimens
[0438] Eastern Cooperative Oncology Group (ECOG) performance status of 0 to 1 or equivalent for patients 12 to 17 years of age
[0439] Patient has adequate organ function as defined by: peripheral white blood cell (WBC) count ≥3000/mm\hat{ }3, absolute lymphocyte count (ALC) ≥800/mm\hat{ }3, absolute neutrophils count (ANC) ≥1500/mm\hat{ }3, platelets ≥100,000/mm\hat{ }3, hemoglobin ≥9 g/dL, albumin ≥3 g/dL, calculated creatinine clearance >50 mL/min using Cockcroft-Gault equation, alanine transaminase (ALT) and aspartate aminotransferase (AST)≤3×upper limit of normal (ULN), total serum bilirubin ≤1.5×ULN OR direct bilirubin ≤1×ULN, international normalized ratio (INR), prothrombin time (PT), or partial thromboplastin time (PTT)≤1.5×ULN, unless patient is receiving anti-coagulant therapy, in which case patients are eligible if PT and PTT are within therapeutic range of intended use of anti-coagulants, and carcinoembryonic antigen levels ≤1.5×ULN.
[0440] A woman of childbearing potential (WCBP) must be willing to undergo pregnancy testing and agrees to the use at least 1 highly effective contraceptive method during the study treatment period and for 5 months after last investigational study treatment.

### Inclusion Criteria for Study Treatment Stage:

[0441] Have a confirmed diagnosis of high-risk stage II or stage III microsatellite stable (MSS)-colon cancer and have had their tumor surgically resected, have completed standard ACT and have no evidence of disease radiographically, and have evidence of MRD based on detection of ctDNA following ACT
[0442] ECOG performance status of 0 to 1 or equivalent for patients 12-17 years of age
[0443] Have adequate organ function with peripheral WBC count ≥2000/mm\hat{ }3, ALC≥500/mm\hat{ }3, ANC≥1000/mm\hat{ }3, platelets ≥75,000/mm\hat{ }3, hemoglobin ≥9 g/dL, albumin ≥3 g/dL, calculated creatinine clearance >40 mL/min using Cockcroft-Gault equation, ALT and AST≤3×ULN, total serum bilirubin ≤1.5×ULN OR direct bilirubin ≤1×ULN, and INR, PT, or PTT≤1.5×ULN
[0444] If a WCBP, must be willing to undergo pregnancy testing and agrees to the use at least 1 highly effective contraceptive method during the study treatment period and for 5 months after last investigational study treatment
[0445] If male and sexually active with a WCBP, must agree to use highly effective contraception such as latex condom plus partner use of a highly effective contraceptive method during the study treatment period and for 5 months after last investigational study treatment.

### Exclusion Criteria for Vaccine Production Stage:

[0446] Patients with micro-satellite instable (MSI)-high disease
[0447] Patients with known tumor mutational burden (TMB)<1 non-synonymous mutations/megabase
[0448] Patients with known DNA Polymerase Epsilon mutations
[0449] Known exposure to chimpanzee adenovirus (ChAd) within the prior 6 months, plan to receive a ChAd-based vaccine in the next 6 months, and/or any history or anaphylaxis in reaction to a vaccination
[0450] Bleeding disorder or history of significant bruising or bleeding following intramuscular (IM) injections or blood draws
[0451] Immunosuppression anticipated at time of study treatment
[0452] Patient has received prior therapy consisting of anti-cytotoxic T lymphocyte-associated antigen (CTLA-4), anti-programmed cell death-1 receptor (PD-1), anti-programmed death ligand-1 (PD-L1), or any other antibody or drug specifically targeting T-cell co-stimulation or checkpoint pathways
[0453] History of allogeneic tissue/solid organ transplant
[0454] Active or history of autoimmune disease or immune deficiency
[0455] History of other cancer within 2 years
[0456] Active tuberculosis or recent (<2 week) clinically significant infection, or evidence of active hepatitis B or hepatitis C or known history of positive test for human immunodeficiency virus (HIV) if CD4+ T-cell count is ≤200 cells/microliter.
[0457] History of pneumonitis requiring systemic steroids for treatment (with the exception of prior resolved in-field radiation pneumonitis)
[0458] Myocardial infarction within 3 months or prior to study treatment, unstable angina, serious uncontrolled cardiac arrhythmia, history of myocarditis, or congestive heart failure
[0459] Pregnant, planning to become pregnant, or nursing

### Exclusion Criteria for Study Treatment Stage:

[0460] Patient is receiving treatment with investigational products and/or other anti-cancer therapies.
[0461] Known exposure to ChAd within the prior 6 months, plan to receive a ChAd-based vaccine in the next 6 months, and/or any history or anaphylaxis in reaction to a vaccination
[0462] Immunosuppression from concurrent, recent (<4 weeks) or anticipated treatment with systemic corticosteroids or other immunosuppressive medications or conditions such as hypogammaglobulinemia, or radiation exposure
[0463] Patients who have not recovered from prior cancer therapy-induced AEs
[0464] Any severe concurrent non-cancer disease
[0465] Active tuberculosis or recent (<2 weeks) clinically significant infection, evidence of active hepatitis B or hepatitis C, or known history of positive test for HIV if CD4+ T-cell count is ≤200 cells/microliter
[0466] History of pneumonitis requiring systemic steroids for treatment
[0467] Myocardial infarction within 6 months prior to initiating study treatment, unstable angina, serious uncontrolled cardiac arrhythmia, history of myocarditis, or congestive heart failure (New York Heart Association [NYHA] Grade 3 and 4).
[0468] Pregnant, planning to become pregnant, or nursing

TABLE 3
Arms and Interventions

| Arms | Assigned Interventions |
|---|---|
| Experimental: GRT-C901/GRT-R902 | Drug: GRT-C901 |
| Vaccine arm | An individualized neoantigen cancer vaccine |
| After surgical resection, patients receive | administered via intramuscular (IM) injections at |
| adjuvant chemotherapy for 12-24 weeks | Visit 1 and boost at Visit 6. |
| during which they undergo neoantigen | Drug: GRT-R902 |
| prediction, randomization, and vaccine | An individualized neoantigen cancer vaccine |
| manufacture. After study treatment | administered via IM injection at Visits 2, 4, 9, and |
| screening, patients receive a total of 6 | 12. |
| doses of GRT-C901/GRT-R902, 2 doses | Drug: Atezolizumab or Nivolumab |
| of ipilimumab, and 13 doses of | Dose of 1680 mg Atezolizumab or 480 mg |
| Atezolizumab or Nivolumab. Study visits | Nivolumab administered once every 4 weeks (Q4W) |
| occur every ~28 days. | via intravenous (IV) infusion at Visits 1-13. |
| | Drug: Ipilimumab |
| | Dose of 30 mg administered via subcutaneous (SC) |
| | injection only with the first dose of GRT-C901 at |
| | Visit 1 and GRT-R902 at Visit 2. |
| | Other Names: Yervoy |
| | Drug: Adjuvant Chemotherapy |
| | Administered according to standard of care. |
| | Drug: Bevacizumab |
| | Bevacizumab is administered as maintenance |
| | therapy per standard of care. |
| | Other Names: Avastin |
| | Drug: Oxaliplatin |
| | Oxaliplatin is administered as induction therapy per |
| | standard of care. |
| | Other Names: Eloxatin |
| Active Comparator: Observation Arm | Drug: Adjuvant chemotherapy |
| After surgical resection, patients will | Administered according to standard of care. |
| receive adjuvant chemotherapy for 12-24 | |
| weeks during which they will undergo | |
| neoantigen prediction and randomization. | |
| Study visits occur every 12 weeks. | |

[0469] While the invention has been particularly shown and described with reference to a preferred embodiment and various alternate embodiments, it will be understood by persons skilled in the relevant art that various changes in form and details can be made therein without departing from the spirit and scope of the invention.

### SEQUENCES

TABLE A
Additional MS Validated Neoantigens
(SEQ ID NOs 29513-29519)

| SEQ | | | HLA Class | Restricted |
|---|---|---|---|---|
| ID NO: | Gene | Mutation | I Subtype | Peptide |
| 29513 | CTNNB1 | S37Y point | HLA-A*02:01 | YLDSGIHYGA |
| | | mutation | | |
| 29514 | CHD4 | CHD4_K73fs | HLA-B*08:01 | TVRAATIL |
| 29515 | CTNNB1 | CTNNB1_S45P | A*11:01 | TTAPPLSGK |
| 29516 | CTNNB1 | CTNNB1_T41A | A*11:01 | ATAPSLSGK |
| 29517 | KRAS | KRAS_G12V | A*03:01 | VVGAVGVGK |
| 29518 | KRAS | KRAS_Q61R | A*01:01 | ILDTAGREEY |
| 29519 | TP53 | TP53_R213L | A*02:01 | YLDDRNTFL |

[0471] Refer to Sequence Listing, SEQ ID NOS. 10,755-21,015. For clarity, each peptide that was predicted to associate with a given HLA allele peptide with an HLA allele with an EDGE score >0.001 is assigned a unique SEQ ID. NO. Each of the above sequence identifiers is associated with the amino acid sequence of the peptide, HLA subtype, the gene name corresponding to the peptide, the mutation associated with the peptide, and whether the prevalence of the peptide:HLA pair was greater than 0.1% (noted as “1”) or less than 0.1% (noted as “0”).

[0472] Table A is disclosed in its entirety in U.S. Provisional Application No. 63/245,663 filed Sep. 17, 2021, which is hereby incorporated by reference in its entirety.

### AACR Genie Results

[0473] Refer to Sequence Listing, SEQ ID NOS. 21,016-29,357. For clarity, each peptide that was predicted to associate with a given HLA allele peptide with an HLA allele with an EDGE score >0.001 and prevalence >0.1% is assigned a unique SEQ ID. NO. Each of the above sequence identifiers is associated with the gene name and mutations corresponding to the peptide, HLA subtype, and amino acid sequence of the peptide. The AACR Genie results is disclosed in its entirety in U.S. Provisional Application No. 63/245,663 filed Sep. 17, 2021, which is hereby incorporated by reference in its entirety.

TABLE 1.2
Tremelimumab VL (SEQ ID NO: 16)
Tremelimumab VH (SEQ ID NO: 17)
Tremelimumab VH CDR1 (SEQ ID NO: 18)
Tremelimumab VH CDR2 (SEQ ID NO: 19)
Tremelimumab VH CDR3 (SEQ ID NO: 20)
Tremelimumab VL CDR1 (SEQ ID NO: 21)
Tremelimumab VL CDR2 (SEQ ID NO: 22)
Tremelimumab VL CDR3 (SEQ ID NO: 23)
Durvalumab (MEDI4736) VL (SEQ ID NO: 24)
MEDI4736 VH (SEQ ID NO: 25)
MEDI4736 VH CDR1 (SEQ ID NO: 26)
MEDI4736 VH CDR2 (SEQ ID NO: 27)
MEDI4736 VH CDR3 (SEQ ID NO: 28)
MEDI4736 VL CDR1 (SEQ ID NO: 29)
MEDI4736 VL CDR2 (SEQ ID NO: 30)
MEDI4736 VL CDR3 (SEQ ID NO: 31)
UbA76-25merPDTT nucleotide (SEQ ID NO: 32)
UbA76-25merPDTT polypeptide (SEQ ID NO: 33)
MAG-25merPDTT nucleotide (SEQ ID NO: 34)
MAG-25merPDTT polypeptide (SEQ ID NO: 35)
Ub7625merPDTT_NoSFL nucleotide (SEQ ID NO: 36)
Ub7625merPDTT_NoSFL polypeptide (SEQ ID NO: 37)
ChAdV68.5WTnt.MAG25mer (SEQ ID NO: 2); AC_000011.1 with E1 (nt 577 to 3403) and E3 (nt
27,125-31,825) sequences deleted; corresponding ATCC VR-594 nucleotides substituted at five
positions; model neoantigen cassette under the control of the CMV promoter/enhancer inserted in
place of deleted E1; SV40 polyA 3′ of cassette
Venezuelan equine encephalitis virus [VEE] (SEQ ID NO: 3) GenBank: L01442.2
VEE-MAG25mer (SEQ ID NO: 4); contains MAG-25merPDTT nucleotide (bases 30-1755)
Venezuelan equine encephalitis virus strain TC-83 [TC-83](SEQ ID NO: 5) GenBank: L01443.1
ATAGGCGGCGCATGAGAGAAGCCCAGACCAATTACCTACCCAAAATGGAGAAAGTTCACGTTGAC
ATCGAGGAAGACAGCCCATTCCTCAGAGCTTTGCAGCGGAGCTTCCCGCAGTTTGAGGTAGAAGCC
AAGCAGGTCACTGATAATGACCATGCTAATGCCAGAGCGTTTTCGCATCTGGCTTCAAAACTGATC
GAAACGGAGGTGGACCCATCCGACACGATCCTTGACATTGGAAGTGCGCCCGCCCGCAGAATGTAT
TCTAAGCACAAGTATCATTGTATCTGTCCGATGAGATGTGCGGAAGATCCGGACAGATTGTATAAG
TATGCAACTAAGCTGAAGAAAAACTGTAAGGAAATAACTGATAAGGAATTGGACAAGAAAATGAA
GGAGCTCGCCGCCGTCATGAGCGACCCTGACCTGGAAACTGAGACTATGTGCCTCCACGACGACGA
GTCGTGTCGCTACGAAGGGCAAGTCGCTGTTTACCAGGATGTATACGCGGTTGACGGACCGACAAG
TCTCTATCACCAAGCCAATAAGGGAGTTAGAGTCGCCTACTGGATAGGCTTTGACACCACCCCTTTT
ATGTTTAAGAACTTGGCTGGAGCATATCCATCATACTCTACCAACTGGGCCGACGAAACCGTGTTA
ACGGCTCGTAACATAGGCCTATGCAGCTCTGACGTTATGGAGCGGTCACGTAGAGGGATGTCCATT
CTTAGAAAGAAGTATTTGAAACCATCCAACAATGTTCTATTCTCTGTTGGCTCGACCATCTACCACG
AGAAGAGGGACTTACTGAGGAGCTGGCACCTGCCGTCTGTATTTCACTTACGTGGCAAGCAAAATT
ACACATGTCGGTGTGAGACTATAGTTAGTTGCGACGGGTACGTCGTTAAAAGAATAGCTATCAGTC
CAGGCCTGTATGGGAAGCCTTCAGGCTATGCTGCTACGATGCACCGCGAGGGATTCTTGTGCTGCA
AAGTGACAGACACATTGAACGGGGAGAGGGTCTCTTTTCCCGTGTGCACGTATGTGCCAGCTACAT
TGTGTGACCAAATGACTGGCATACTGGCAACAGATGTCAGTGCGGACGACGCGCAAAAACTGCTG
GTTGGGCTCAACCAGCGTATAGTCGTCAACGGTCGCACCCAGAGAAACACCAATACCATGAAAAAT
TACCTTTTGCCCGTAGTGGCCCAGGCATTTGCTAGGTGGGCAAAGGAATATAAGGAAGATCAAGAA
GATGAAAGGCCACTAGGACTACGAGATAGACAGTTAGTCATGGGGTGTTGTTGGGCTTTTAGAAGG
CACAAGATAACATCTATTTATAAGCGCCCGGATACCCAAACCATCATCAAAGTGAACAGCGATTTC
CACTCATTCGTGCTGCCCAGGATAGGCAGTAACACATTGGAGATCGGGCTGAGAACAAGAATCAG
GAAAATGTTAGAGGAGCACAAGGAGCCGTCACCTCTCATTACCGCCGAGGACGTACAAGAAGCTA
AGTGCGCAGCCGATGAGGCTAAGGAGGTGCGTGAAGCCGAGGAGTTGCGCGCAGCTCTACCACCT
TTGGCAGCTGATGTTGAGGAGCCCACTCTGGAAGCCGATGTCGACTTGATGTTACAAGAGGCTGGG
GCCGGCTCAGTGGAGACACCTCGTGGCTTGATAAAGGTTACCAGCTACGATGGCGAGGACAAGATC
GGCTCTTACGCTGTGCTTTCTCCGCAGGCTGTACTCAAGAGTGAAAAATTATCTTGCATCCACCCTC
TCGCTGAACAAGTCATAGTGATAACACACTCTGGCCGAAAAGGGCGTTATGCCGTGGAACCATACC
ATGGTAAAGTAGTGGTGCCAGAGGGACATGCAATACCCGTCCAGGACTTTCAAGCTCTGAGTGAAA
GTGCCACCATTGTGTACAACGAACGTGAGTTCGTAAACAGGTACCTGCACCATATTGCCACACATG
GAGGAGCGCTGAACACTGATGAAGAATATTACAAAACTGTCAAGCCCAGCGAGCACGACGGCGAA
TACCTGTACGACATCGACAGGAAACAGTGCGTCAAGAAAGAACTAGTCACTGGGCTAGGGCTCAC
AGGCGAGCTGGTGGATCCTCCCTTCCATGAATTCGCCTACGAGAGTCTGAGAACACGACCAGCCGC
TCCTTACCAAGTACCAACCATAGGGGTGTATGGCGTGCCAGGATCAGGCAAGTCTGGCATCATTAA
AAGCGCAGTCACCAAAAAAGATCTAGTGGTGAGCGCCAAGAAAGAAAACTGTGCAGAAATTATAA
GGGACGTCAAGAAAATGAAAGGGCTGGACGTCAATGCCAGAACTGTGGACTCAGTGCTCTTGAAT
GGATGCAAACACCCCGTAGAGACCCTGTATATTGACGAAGCTTTTGCTTGTCATGCAGGTACTCTCA
GAGCGCTCATAGCCATTATAAGACCTAAAAAGGCAGTGCTCTGCGGGGATCCCAAACAGTGCGGTT
TTTTTAACATGATGTGCCTGAAAGTGCATTTTAACCACGAGATTTGCACACAAGTCTTCCACAAAAG
CATCTCTCGCCGTTGCACTAAATCTGTGACTTCGGTCGTCTCAACCTTGTTTTACGACAAAAAAATG
AGAACGACGAATCCGAAAGAGACTAAGATTGTGATTGACACTACCGGCAGTACCAAACCTAAGCA
GGACGATCTCATTCTCACTTGTTTCAGAGGGTGGGTGAAGCAGTTGCAAATAGATTACAAAGGCAA
CGAAATAATGACGGCAGCTGCCTCTCAAGGGCTGACCCGTAAAGGTGTGTATGCCGTTCGGTACAA
GGTGAATGAAAATCCTCTGTACGCACCCACCTCAGAACATGTGAACGTCCTACTGACCCGCACGGA
GGACCGCATCGTGTGGAAAACACTAGCCGGCGACCCATGGATAAAAACACTGACTGCCAAGTACC
CTGGGAATTTCACTGCCACGATAGAGGAGTGGCAAGCAGAGCATGATGCCATCATGAGGCACATCT
TGGAGAGACCGGACCCTACCGACGTCTTCCAGAATAAGGCAAACGTGTGTTGGGCCAAGGCTTTAG
TGCCGGTGCTGAAGACCGCTGGCATAGACATGACCACTGAACAATGGAACACTGTGGATTATTTTG
AAACGGACAAAGCTCACTCAGCAGAGATAGTATTGAACCAACTATGCGTGAGGTTCTTTGGACTCG
ATCTGGACTCCGGTCTATTTTCTGCACCCACTGTTCCGTTATCCATTAGGAATAATCACTGGGATAA
CTCCCCGTCGCCTAACATGTACGGGCTGAATAAAGAAGTGGTCCGTCAGCTCTCTCGCAGGTACCC
ACAACTGCCTCGGGCAGTTGCCACTGGAAGAGTCTATGACATGAACACTGGTACACTGCGCAATTA
TGATCCGCGCATAAACCTAGTACCTGTAAACAGAAGACTGCCTCATGCTTTAGTCCTCCACCATAAT
GAACACCCACAGAGTGACTTTTCTTCATTCGTCAGCAAATTGAAGGGCAGAACTGTCCTGGTGGTC
GGGGAAAAGTTGTCCGTCCCAGGCAAAATGGTTGACTGGTTGTCAGACCGGCCTGAGGCTACCTTC
AGAGCTCGGCTGGATTTAGGCATCCCAGGTGATGTGCCCAAATATGACATAATATTTGTTAATGTG
AGGACCCCATATAAATACCATCACTATCAGCAGTGTGAAGACCATGCCATTAAGCTTAGCATGTTG
ACCAAGAAAGCTTGTCTGCATCTGAATCCCGGCGGAACCTGTGTCAGCATAGGTTATGGTTACGCT
GACAGGGCCAGCGAAAGCATCATTGGTGCTATAGCGCGGCAGTTCAAGTTTTCCCGGGTATGCAAA
CCGAAATCCTCACTTGAAGAGACGGAAGTTCTGTTTGTATTCATTGGGTACGATCGCAAGGCCCGT
ACGCACAATCCTTACAAGCTTTCATCAACCTTGACCAACATTTATACAGGTTCCAGACTCCACGAAG
CCGGATGTGCACCCTCATATCATGTGGTGCGAGGGGATATTGCCACGGCCACCGAAGGAGTGATTA
TAAATGCTGCTAACAGCAAAGGACAACCTGGCGGAGGGGTGTGCGGAGCGCTGTATAAGAAATTC
CCGGAAAGCTTCGATTTACAGCCGATCGAAGTAGGAAAAGCGCGACTGGTCAAAGGTGCAGCTAA
ACATATCATTCATGCCGTAGGACCAAACTTCAACAAAGTTTCGGAGGTTGAAGGTGACAAACAGTT
GGCAGAGGCTTATGAGTCCATCGCTAAGATTGTCAACGATAACAATTACAAGTCAGTAGCGATTCC
ACTGTTGTCCACCGGCATCTTTTCCGGGAACAAAGATCGACTAACCCAATCATTGAACCATTTGCTG
ACAGCTTTAGACACCACTGATGCAGATGTAGCCATATACTGCAGGGACAAGAAATGGGAAATGAC
TCTCAAGGAAGCAGTGGCTAGGAGAGAAGCAGTGGAGGAGATATGCATATCCGACGACTCTTCAG
TGACAGAACCTGATGCAGAGCTGGTGAGGGTGCATCCGAAGAGTTCTTTGGCTGGAAGGAAGGGC
TACAGCACAAGCGATGGCAAAACTTTCTCATATTTGGAAGGGACCAAGTTTCACCAGGCGGCCAAG
GATATAGCAGAAATTAATGCCATGTGGCCCGTTGCAACGGAGGCCAATGAGCAGGTATGCATGTAT
ATCCTCGGAGAAAGCATGAGCAGTATTAGGTCGAAATGCCCCGTCGAAGAGTCGGAAGCCTCCAC
ACCACCTAGCACGCTGCCTTGCTTGTGCATCCATGCCATGACTCCAGAAAGAGTACAGCGCCTAAA
AGCCTCACGTCCAGAACAAATTACTGTGTGCTCATCCTTTCCATTGCCGAAGTATAGAATCACTGGT
GTGCAGAAGATCCAATGCTCCCAGCCTATATTGTTCTCACCGAAAGTGCCTGCGTATATTCATCCAA
GGAAGTATCTCGTGGAAACACCACCGGTAGACGAGACTCCGGAGCCATCGGCAGAGAACCAATCC
ACAGAGGGGACACCTGAACAACCACCACTTATAACCGAGGATGAGACCAGGACTAGAACGCCTGA
GCCGATCATCATCGAAGAGGAAGAAGAGGATAGCATAAGTTTGCTGTCAGATGGCCCGACCCACC
AGGTGCTGCAAGTCGAGGCAGACATTCACGGGCCGCCCTCTGTATCTAGCTCATCCTGGTCCATTCC
TCATGCATCCGACTTTGATGTGGACAGTTTATCCATACTTGACACCCTGGAGGGAGCTAGCGTGACC
AGCGGGGCAACGTCAGCCGAGACTAACTCTTACTTCGCAAAGAGTATGGAGTTTCTGGCGCGACCG
GTGCCTGCGCCTCGAACAGTATTCAGGAACCCTCCACATCCCGCTCCGCGCACAAGAACACCGTCA
CTTGCACCCAGCAGGGCCTGCTCGAGAACCAGCCTAGTTTCCACCCCGCCAGGCGTGAATAGGGTG
ATCACTAGAGAGGAGCTCGAGGCGCTTACCCCGTCACGCACTCCTAGCAGGTCGGTCTCGAGAACC
AGCCTGGTCTCCAACCCGCCAGGCGTAAATAGGGTGATTACAAGAGAGGAGTTTGAGGCGTTCGTA
GCACAACAACAATGACGGTTTGATGCGGGTGCATACATCTTTTCCTCCGACACCGGTCAAGGGCAT
TTACAACAAAAATCAGTAAGGCAAACGGTGCTATCCGAAGTGGTGTTGGAGAGGACCGAATTGGA
GATTTCGTATGCCCCGCGCCTCGACCAAGAAAAAGAAGAATTACTACGCAAGAAATTACAGTTAAA
TCCCACACCTGCTAACAGAAGCAGATACCAGTCCAGGAAGGTGGAGAACATGAAAGCCATAACAG
CTAGACGTATTCTGCAAGGCCTAGGGCATTATTTGAAGGCAGAAGGAAAAGTGGAGTGCTACCGA
ACCCTGCATCCTGTTCCTTTGTATTCATCTAGTGTGAACCGTGCCTTTTCAAGCCCCAAGGTCGCAG
TGGAAGCCTGTAACGCCATGTTGAAAGAGAACTTTCCGACTGTGGCTTCTTACTGTATTATTCCAGA
GTACGATGCCTATTTGGACATGGTTGACGGAGCTTCATGCTGCTTAGACACTGCCAGTTTTTGCCCT
GCAAAGCTGCGCAGCTTTCCAAAGAAACACTCCTATTTGGAACCCACAATACGATCGGCAGTGCCT
TCAGCGATCCAGAACACGCTCCAGAACGTCCTGGCAGCTGCCACAAAAAGAAATTGCAATGTCACG
CAAATGAGAGAATTGCCCGTATTGGATTCGGCGGCCTTTAATGTGGAATGCTTCAAGAAATATGCG
TGTAATAATGAATATTGGGAAACGTTTAAAGAAAACCCCATCAGGCTTACTGAAGAAAACGTGGTA
AATTACATTACCAAATTAAAAGGACCAAAAGCTGCTGCTCTTTTTGCGAAGACACATAATTTGAAT
ATGTTGCAGGACATACCAATGGACAGGTTTGTAATGGACTTAAAGAGAGACGTGAAAGTGACTCCA
GGAACAAAACATACTGAAGAACGGCCCAAGGTACAGGTGATCCAGGCTGCCGATCCGCTAGCAAC
AGCGTATCTGTGCGGAATCCACCGAGAGCTGGTTAGGAGATTAAATGCGGTCCTGCTTCCGAACAT
TCATACACTGTTTGATATGTCGGCTGAAGACTTTGACGCTATTATAGCCGAGCACTTCCAGCCTGGG
GATTGTGTTCTGGAAACTGACATCGCGTCGTTTGATAAAAGTGAGGACGACGCCATGGCTCTGACC
GCGTTAATGATTCTGGAAGACTTAGGTGTGGACGCAGAGCTGTTGACGCTGATTGAGGCGGCTTTC
GGCGAAATTTCATCAATACATTTGCCCACTAAAACTAAATTTAAATTCGGAGCCATGATGAAATCT
GGAATGTTCCTCACACTGTTTGTGAACACAGTCATTAACATTGTAATCGCAAGCAGAGTGTTGAGA
GAACGGCTAACCGGATCACCATGTGCAGCATTCATTGGAGATGACAATATCGTGAAAGGAGTCAA
ATCGGACAAATTAATGGCAGACAGGTGCGCCACCTGGTTGAATATGGAAGTCAAGATTATAGATGC
TGTGGTGGGCGAGAAAGCGCCTTATTTCTGTGGAGGGTTTATTTTGTGTGACTCCGTGACCGGCACA
GCGTGCCGTGTGGCAGACCCCCTAAAAAGGCTGTTTAAGCTTGGCAAACCTCTGGCAGCAGACGAT
GAACATGATGATGACAGGAGAAGGGCATTGCATGAAGAGTCAACACGCTGGAACCGAGTGGGTAT
TCTTTCAGAGCTGTGCAAGGCAGTAGAATCAAGGTATGAAACCGTAGGAACTTCCATCATAGTTAT
GGCCATGACTACTCTAGCTAGCAGTGTTAAATCATTCAGCTACCTGAGAGGGGCCCCTATAACTCTC
TACGGCTAACCTGAATGGACTACGACATAGTCTAGTCCGCCAAGATGTTCCCGTTCCAGCCAATGT
ATCCGATGCAGCCAATGCCCTATCGCAACCCGTTCGCGGCCCCGCGCAGGCCCTGGTTCCCCAGAA
CCGACCCTTTTCTGGCGATGCAGGTGCAGGAATTAACCCGCTCGATGGCTAACCTGACGTTCAAGC
AACGCCGGGACGCGCCACCTGAGGGGCCATCCGCTAAGAAACCGAAGAAGGAGGCCTCGCAAAAA
CAGAAAGGGGGAGGCCAAGGGAAGAAGAAGAAGAACCAAGGGAAGAAGAAGGCTAAGACAGGG
CCGCCTAATCCGAAGGCACAGAATGGAAACAAGAAGAAGACCAACAAGAAACCAGGCAAGAGAC
AGCGCATGGTCATGAAATTGGAATCTGACAAGACGTTCCCAATCATGTTGGAAGGGAAGATAAAC
GGCTACGCTTGTGTGGTCGGAGGGAAGTTATTCAGGCCGATGCATGTGGAAGGCAAGATCGACAAC
GACGTTCTGGCCGCGCTTAAGACGAAGAAAGCATCCAAATACGATCTTGAGTATGCAGATGTGCCA
CAGAACATGCGGGCCGATACATTCAAATACACCCATGAGAAACCCCAAGGCTATTACAGCTGGCAT
CATGGAGCAGTCCAATATGAAAATGGGCGTTTCACGGTGCCGAAAGGAGTTGGGGCCAAGGGAGA
CAGCGGACGACCCATTCTGGATAACCAGGGACGGGTGGTCGCTATTGTGCTGGGAGGTGTGAATGA
AGGATCTAGGACAGCCCTTTCAGTCGTCATGTGGAACGAGAAGGGAGTTACCGTGAAGTATACTCC
GGAGAACTGCGAGCAATGGTCACTAGTGACCACCATGTGTCTGCTCGCCAATGTGACGTTCCCATG
TGCTCAACCACCAATTTGCTACGACAGAAAACCAGCAGAGACTTTGGCCATGCTCAGCGTTAACGT
TGACAACCCGGGCTACGATGAGCTGCTGGAAGCAGCTGTTAAGTGCCCCGGAAGGAAAAGGAGAT
CCACCGAGGAGCTGTTTAATGAGTATAAGCTAACGCGCCCTTACATGGCCAGATGCATCAGATGTG
CAGTTGGGAGCTGCCATAGTCCAATAGCAATCGAGGCAGTAAAGAGCGACGGGCACGACGGTTAT
GTTAGACTTCAGACTTCCTCGCAGTATGGCCTGGATTCCTCCGGCAACTTAAAGGGCAGGACCATG
CGGTATGACATGCACGGGACCATTAAAGAGATACCACTACATCAAGTGTCACTCTATACATCTCGC
CCGTGTCACATTGTGGATGGGCACGGTTATTTCCTGCTTGCCAGGTGCCCGGCAGGGGACTCCATCA
CCATGGAATTTAAGAAAGATTCCGTCAGACACTCCTGCTCGGTGCCGTATGAAGTGAAATTTAATC
CTGTAGGCAGAGAACTCTATACTCATCCCCCAGAACACGGAGTAGAGCAAGCGTGCCAAGTCTACG
CACATGATGCACAGAACAGAGGAGCTTATGTCGAGATGCACCTCCCGGGCTCAGAAGTGGACAGC
AGTTTGGTTTCCTTGAGCGGCAGTTCAGTCACCGTGACACCTCCTGATGGGACTAGCGCCCTGGTGG
AATGCGAGTGTGGCGGCACAAAGATCTCCGAGACCATCAACAAGACAAAACAGTTCAGCCAGTGC
ACAAAGAAGGAGCAGTGCAGAGCATATCGGCTGCAGAACGATAAGTGGGTGTATAATTCTGACAA
ACTGCCCAAAGCAGCGGGAGCCACCTTAAAAGGAAAACTGCATGTCCCATTCTTGCTGGCAGACGG
CAAATGCACCGTGCCTCTAGCACCAGAACCTATGATAACCTTCGGTTTCAGATCAGTGTCACTGAA
ACTGCACCCTAAGAATCCCACATATCTAATCACCCGCCAACTTGCTGATGAGCCTCACTACACGCA
CGAGCTCATATCTGAACCAGCTGTTAGGAATTTTACCGTCACCGAAAAAGGGTGGGAGTTTGTATG
GGGAAACCACCCGCCGAAAAGGTTTTGGGCACAGGAAACAGCACCCGGAAATCCACATGGGCTAC
CGCACGAGGTGATAACTCATTATTACCACAGATACCCTATGTCCACCATCCTGGGTTTGTCAATTTG
TGCCGCCATTGCAACCGTTTCCGTTGCAGCGTCTACCTGGCTGTTTTGCAGATCTAGAGTTGCGTGC
CTAACTCCTTACCGGCTAACACCTAACGCTAGGATACCATTTTGTCTGGCTGTGCTTTGCTGCGCCC
GCACTGCCCGGGCCGAGACCACCTGGGAGTCCTTGGATCACCTATGGAACAATAACCAACAGATGT
TCTGGATTCAATTGCTGATCCCTCTGGCCGCCTTGATCGTAGTGACTCGCCTGCTCAGGTGCGTGTG
CTGTGTCGTGCCTTTTTTAGTCATGGCCGGCGCCGCAGGCGCCGGCGCCTACGAGCACGCGACCAC
GATGCCGAGCCAAGCGGGAATCTCGTATAACACTATAGTCAACAGAGCAGGCTACGCACCACTCCC
TATCAGCATAACACCAACAAAGATCAAGCTGATACCTACAGTGAACTTGGAGTACGTCACCTGCCA
CTACAAAACAGGAATGGATTCACCAGCCATCAAATGCTGCGGATCTCAGGAATGCACTCCAACTTA
CAGGCCTGATGAACAGTGCAAAGTCTTCACAGGGGTTTACCCGTTCATGTGGGGTGGTGCATATTG
CTTTTGCGACACTGAGAACACCCAAGTCAGCAAGGCCTACGTAATGAAATCTGACGACTGCCTTGC
GGATCATGCTGAAGCATATAAAGCGCACACAGCCTCAGTGCAGGCGTTCCTCAACATCACAGTGGG
AGAACACTCTATTGTGACTACCGTGTATGTGAATGGAGAAACTCCTGTGAATTTCAATGGGGTCAA
AATAACTGCAGGTCCGCTTTCCACAGCTTGGACACCCTTTGATCGCAAAATCGTGCAGTATGCCGG
GGAGATCTATAATTATGATTTTCCTGAGTATGGGGCAGGACAACCAGGAGCATTTGGAGATATACA
ATCCAGAACAGTCTCAAGCTCTGATCTGTATGCCAATACCAACCTAGTGCTGCAGAGACCCAAAGC
AGGAGCGATCCACGTGCCATACACTCAGGCACCTTCGGGTTTTGAGCAATGGAAGAAAGATAAAG
CTCCATCATTGAAATTTACCGCCCCTTTCGGATGCGAAATATATACAAACCCCATTCGCGCCGAAAA
CTGTGCTGTAGGGTCAATTCCATTAGCCTTTGACATTCCCGACGCCTTGTTCACCAGGGTGTCAGAA
ACACCGACACTTTCAGCGGCCGAATGCACTCTTAACGAGTGCGTGTATTCTTCCGACTTTGGTGGGA
TCGCCACGGTCAAGTACTCGGCCAGCAAGTCAGGCAAGTGCGCAGTCCATGTGCCATCAGGGACTG
CTACCCTAAAAGAAGCAGCAGTCGAGCTAACCGAGCAAGGGTCGGCGACTATCCATTTCTCGACCG
CAAATATCCACCCGGAGTTCAGGCTCCAAATATGCACATCATATGTTACGTGCAAAGGTGATTGTC
ACCCCCCGAAAGACCATATTGTGACACACCCTCAGTATCACGCCCAAACATTTACAGCCGCGGTGT
CAAAAACCGCGTGGACGTGGTTAACATCCCTGCTGGGAGGATCAGCCGTAATTATTATAATTGGCT
TGGTGCTGGCTACTATTGTGGCCATGTACGTGCTGACCAACCAGAAACATAATTGAATACAGCAGC
AATTGGCAAGCTGCTTACATAGAACTCGCGGCGATTGGCATGCCGCCTTAAAATTTTTATTTTATTT
TTCTTTTCTTTTCCGAATCGGATTTTGTTTTTAATATTTC
VEE Delivery Vector (SEQ ID NO: 6); VEE genome with nucleotides 7544-11175 deleted [alphavirus
structural proteins removed]
ATGggcggcgcatgagagaagcccagaccaattacctacccaaaATGGagaaagttcacgttgacatcgaggaagacagccc
attcctcagagctttgcagcggagcttcccgcagtttgaggtagaagccaagcaggtcactgataatgaccatgctaatgccagagcgtt
ttcgcatctggcttcaaaactgatcgaaacggaggtggacccatccgacacgatccttgacattggaagtgcgcccgcccgcagaatgt
attctaagcacaagtatcattgtatctgtccgatgagatgtgcggaagatccggacagattgtataagtatgcaactaagctgaagaaaaa
ctgtaaggaaataactgataaggaattggacaagaaaatgaaggagctcgccgccgtcatgagcgaccctgacctggaaactgagac
tatgtgcctccacgacgacgagtcgtgtcgctacgaagggcaagtcgctgtttaccaggatgtatacgcggttgacggaccgacaagtc
tctatcaccaagccaataagggagttagagtcgcctactggataggctttgacaccaccccttttatgtttaagaacttggctggagcatat
ccatcatactctaccaactgggccgacgaaaccgtgttaacggctcgtaacataggcctatgcagctctgacgttatggagcggtcacgt
agagggatgtccattcttagaaagaagtatttgaaaccatccaacaatgttctattctctgttggctcgaccatctaccacgagaagaggg
acttactgaggagctggcacctgccgtctgtatttcacttacgtggcaagcaaaattacacatgtcggtgtgagactatagttagttgcgac
gggtacgtcgttaaaagaatagctatcagtccaggcctgtatgggaagccttcaggctatgctgctacgatgcaccgcgagggattcttg
tgctgcaaagtgacagacacattgaacggggagagggtctcttttcccgtgtgcacgtatgtgccagctacattgtgtgaccaaatgact
ggcatactggcaacagatgtcagtgcggacgacgcgcaaaaactgctggttgggctcaaccagcgtatagtcgtcaacggtcgcacc
cagagaaacaccaataccatgaaaaattaccttttgcccgtagtggcccaggcatttgctaggtgggcaaaggaatataaggaagatca
agaagatgaaaggccactaggactacgagatagacagttagtcatggggtgttgttgggcttttagaaggcacaagataacatctatttat
aagcgcccggatacccaaaccatcatcaaagtgaacagcgatttccactcattcgtgctgcccaggataggcagtaacacattggagat
cgggctgagaacaagaatcaggaaaatgttagaggagcacaaggagccgtcacctctcattaccgccgaggacgtacaagaagcta
agtgcgcagccgatgaggctaaggaggtgcgtgaagccgaggagttgcgcgcagctctaccacctttggcagctgatgttgaggagc
ccactctggaagccgatgtcgacttgatgttacaagaggctggggccggctcagtggagacacctcgtggcttgataaaggttaccag
ctacgctggcgaggacaagatcggctcttacgctgtgctttctccgcaggctgtactcaagagtgaaaaattatcttgcatccaccctctc
gctgaacaagtcatagtgataacacactctggccgaaaagggcgttatgccgtggaaccataccatggtaaagtagtggtgccagagg
gacatgcaatacccgtccaggactttcaagctctgagtgaaagtgccaccattgtgtacaacgaacgtgagttcgtaaacaggtacctgc
accatattgccacacatggaggagcgctgaacactgatgaagaatattacaaaactgtcaagcccagcgagcacgacggcgaatacct
gtacgacatcgacaggaaacagtgcgtcaagaaagaactagtcactgggctagggctcacaggcgagctggtggatcctcccttccat
gaattcgcctacgagagtctgagaacacgaccagccgctccttaccaagtaccaaccataggggtgtatggcgtgccaggatcaggc
aagtctggcatcattaaaagcgcagtcaccaaaaaagatctagtggtgagcgccaagaaagaaaactgtgcagaaattataagggacg
tcaagaaaatgaaagggctggacgtcaatgccagaactgtggactcagtgctcttgaatggatgcaaacaccccgtagagaccctgtat
attgacgaagcttttgcttgtcatgcaggtactctcagagcgctcatagccattataagacctaaaaaggcagtgctctgcggggatccca
aacagtgcggtttttttaacatgatgtgcctgaaagtgcattttaaccacgagatttgcacacaagtcttccacaaaagcatctctcgccgtt
gcactaaatctgtgacttcggtcgtctcaaccttgttttacgacaaaaaaatgagaacgacgaatccgaaagagactaagattgtgattga
cactaccggcagtaccaaacctaagcaggacgatctcattctcacttgtttcagagggtgggtgaagcagttgcaaatagattacaaagg
caacgaaataatgacggcagctgcctctcaagggctgacccgtaaaggtgtgtatgccgttcggtacaaggtgaatgaaaatcctctgt
acgcacccacctcagaacatgtgaacgtcctactgacccgcacggaggaccgcatcgtgtggaaaacactagccggcgacccatgg
ataaaaacactgactgccaagtaccctgggaatttcactgccacgatagaggagtggcaagcagagcatgatgccatcatgaggcaca
tcttggagagaccggaccctaccgacgtcttccagaataaggcaaacgtgtgttgggccaaggctttagtgccggtgctgaagaccgct
ggcatagacatgaccactgaacaatggaacactgtggattattttgaaacggacaaagctcactcagcagagatagtattgaaccaacta
tgcgtgaggttctttggactcgatctggactccggtctattttctgcacccactgttccgttatccattaggaataatcactgggataactccc
cgtcgcctaacatgtacgggctgaataaagaagtggtccgtcagctctctcgcaggtacccacaactgcctcgggcagttgccactgga
agagtctatgacatgaacactggtacactgcgcaattatgatccgcgcataaacctagtacctgtaaacagaagactgcctcatgctttag
tcctccaccataatgaacacccacagagtgacttttcttcattcgtcagcaaattgaagggcagaactgtcctggtggtcggggaaaagtt
gtccgtcccaggcaaaatggttgactggttgtcagaccggcctgaggctaccttcagagctcggctggatttaggcatcccaggtgatgt
gcccaaatatgacataatatttgttaatgtgaggaccccatataaataccatcactatcagcagtgtgaagaccatgccattaagcttagca
tgttgaccaagaaagcttgtctgcatctgaatcccggcggaacctgtgtcagcataggttatggttacgctgacagggccagcgaaagc
atcattggtgctatagcgcggcagttcaagttttcccgggtatgcaaaccgaaatcctcacttgaagagacggaagttctgtttgtattcatt
gggtacgatcgcaaggcccgtacgcacaatccttacaagctttcatcaaccttgaccaacatttatacaggttccagactccacgaagcc
ggatgtgcaccctcatatcatgtggtgcgaggggatattgccacggccaccgaaggagtgattataaatgctgctaacagcaaaggac
aacctggcggaggggtgtgcggagcgctgtataagaaattcccggaaagcttcgatttacagccgatcgaagtaggaaaagcgcgac
tggtcaaaggtgcagctaaacatatcattcatgccgtaggaccaaacttcaacaaagtttcggaggttgaaggtgacaaacagttggca
gaggcttatgagtccatcgctaagattgtcaacgataacaattacaagtcagtagcgattccactgttgtccaccggcatcttttccgggaa
caaagatcgactaacccaatcattgaaccatttgctgacagctttagacaccactgatgcagatgtagccatatactgcagggacaagaa
atgggaaatgactctcaaggaagcagtggctaggagagaagcagtggaggagatatgcatatccgacgactcttcagtgacagaacc
tgatgcagagctggtgagggtgcatccgaagagttctttggctggaaggaagggctacagcacaagcgatggcaaaactttctcatattt
ggaagggaccaagtttcaccaggcggccaaggatatagcagaaattaatgccatgtggcccgttgcaacggaggccaatgagcaggt
atgcatgtatatcctcggagaaagcatgagcagtattaggtcgaaatgccccgtcgaagagtcggaagcctccacaccacctagcacg
ctgccttgcttgtgcatccatgccatgactccagaaagagtacagcgcctaaaagcctcacgtccagaacaaattactgtgtgctcatcct
ttccattgccgaagtatagaatcactggtgtgcagaagatccaatgctcccagcctatattgttctcaccgaaagtgcctgcgtatattcatc
caaggaagtatctcgtggaaacaccaccggtagacgagactccggagccatcggcagagaaccaatccacagaggggacacctga
acaaccaccacttataaccgaggatgagaccaggactagaacgcctgagccgatcatcatcgaagaggaagaagaggatagcataa
gtttgctgtcagatggcccgacccaccaggtgctgcaagtcgaggcagacattcacgggccgccctctgtatctagctcatcctggtcc
attcctcatgcatccgactttgatgtggacagtttatccatacttgacaccctggagggagctagcgtgaccagcggggcaacgtcagcc
gagactaactcttacttcgcaaagagtatggagtttctggcgcgaccggtgcctgcgcctcgaacagtattcaggaaccctccacatccc
gctccgcgcacaagaacaccgtcacttgcacccagcagggcctgctcgagaaccagcctagtttccaccccgccaggcgtgaatagg
gtgatcactagagaggagctcgaggcgcttaccccgtcacgcactcctagcaggtcggtctcgagaaccagcctggtctccaacccg
ccaggcgtaaatagggtgattacaagagaggagtttgaggcgttcgtagcacaacaacaatgacggtttgatgcgggtgcatacatcttt
tcctccgacaccggtcaagggcatttacaacaaaaatcagtaaggcaaacggtgctatccgaagtggtgttggagaggaccgaattgg
agatttcgtatgccccgcgcctcgaccaagaaaaagaagaattactacgcaagaaattacagttaaatcccacacctgctaacagaagc
agataccagtccaggaaggtggagaacatgaaagccataacagctagacgtattctgcaaggcctagggcattatttgaaggcagaag
gaaaagtggagtgctaccgaaccctgcatcctgttcctttgtattcatctagtgtgaaccgtgccttttcaagccccaaggtcgcagtgga
agcctgtaacgccatgttgaaagagaactttccgactgtggcttcttactgtattattccagagtacgatgcctatttggacatggttgacgg
agcttcatgctgcttagacactgccagtttttgccctgcaaagctgcgcagctttccaaagaaacactcctatttggaacccacaatacgat
cggcagtgccttcagcgatccagaacacgctccagaacgtcctggcagctgccacaaaaagaaattgcaatgtcacgcaaatgagag
aattgcccgtattggattcggcggcctttaatgtggaatgcttcaagaaatatgcgtgtaataatgaatattgggaaacgtttaaagaaaac
cccatcaggcttactgaagaaaacgtggtaaattacattaccaaattaaaaggaccaaaagctgctgctctttttgcgaagacacataattt
gaatatgttgcaggacataccaatggacaggtttgtaatggacttaaagagagacgtgaaagtgactccaggaacaaaacatactgaag
aacggcccaaggtacaggtgatccaggctgccgatccgctagcaacagcgtatctgtgcggaatccaccgagagctggttaggagat
taaatgcggtcctgcttccgaacattcatacactgtttgatatgtcggctgaagactttgacgctattatagccgagcacttccagcctggg
gattgtgttctggaaactgacatcgcgtcgtttgataaaagtgaggacgacgccatggctctgaccgcgttaatgattctggaagacttag
gtgtggacgcagagctgttgacgctgattgaggcggctttcggcgaaatttcatcaatacatttgcccactaaaactaaatttaaattcgga
gccatgatgaaatctggaatgttcctcacactgtttgtgaacacagtcattaacattgtaatcgcaagcagagtgttgagagaacggctaa
ccggatcaccatgtgcagcattcattggagatgacaatatcgtgaaaggagtcaaatcggacaaattaatggcagacaggtgcgccac
ctggttgaatatggaagtcaagattatagatgctgtggtgggcgagaaagcgccttatttctgtggagggtttattttgtgtgactccgtgac
cggcacagcgtgccgtgtggcagaccccctaaaaaggctgtttaagcttggcaaacctctggcagcagacgatgaacatgatgatgac
aggagaagggcattgcatgaagagtcaacacgctggaaccgagtgggtattctttcagagctgtgcaaggcagtagaatcaaggtatg
aaaccgtaggaacttccatcatagttatggccatgactactctagctagcagtgttaaatcattcagctacctgagaggggcccctataact
ctctacggcTAAcctgaatggactacgacgtatcacgcccaaacatttacagccgcggtgtcaaaaaccgcgtggacgtggttaaca
tccctgctgggaggatcagccgtaattattataattggcttggtgctggctactattgtggccatgtacgtgctgaccaaccagaaacataa
ttgaatacagcagcaattggcaagctgcttacatagaactcgcggcgattggcatgccgccttaaaatttttattttattttttcttttcttt
tccgaatcggattttgtttttaatatttcAAAAAAAAAAAAAAAAAAAAAAAAAAAAAAAAAAAAAAAA
AAAAAAAAAAAAAAAAAAAAAAAAAAAAAAAAAAAAAAAA
TC-83 Delivery Vector(SEQ ID NO: 7); TC-83 genome with nucleotides 7544-11175 deleted
[alphavirus structural proteins removed]
ATAGGCGGCGCATGAGAGAAGCCCAGACCAATTACCTACCCAAAATGGAGAAAGTTCACGTTGAC
ATCGAGGAAGACAGCCCATTCCTCAGAGCTTTGCAGCGGAGCTTCCCGCAGTTTGAGGTAGAAGCC
AAGCAGGTCACTGATAATGACCATGCTAATGCCAGAGCGTTTTCGCATCTGGCTTCAAAACTGATC
GAAACGGAGGTGGACCCATCCGACACGATCCTTGACATTGGAAGTGCGCCCGCCCGCAGAATGTAT
TCTAAGCACAAGTATCATTGTATCTGTCCGATGAGATGTGCGGAAGATCCGGACAGATTGTATAAG
TATGCAACTAAGCTGAAGAAAAACTGTAAGGAAATAACTGATAAGGAATTGGACAAGAAAATGAA
GGAGCTCGCCGCCGTCATGAGCGACCCTGACCTGGAAACTGAGACTATGTGCCTCCACGACGACGA
GTCGTGTCGCTACGAAGGGCAAGTCGCTGTTTACCAGGATGTATACGCGGTTGACGGACCGACAAG
TCTCTATCACCAAGCCAATAAGGGAGTTAGAGTCGCCTACTGGATAGGCTTTGACACCACCCCTTTT
ATGTTTAAGAACTTGGCTGGAGCATATCCATCATACTCTACCAACTGGGCCGACGAAACCGTGTTA
ACGGCTCGTAACATAGGCCTATGCAGCTCTGACGTTATGGAGCGGTCACGTAGAGGGATGTCCATT
CTTAGAAAGAAGTATTTGAAACCATCCAACAATGTTCTATTCTCTGTTGGCTCGACCATCTACCACG
AGAAGAGGGACTTACTGAGGAGCTGGCACCTGCCGTCTGTATTTCACTTACGTGGCAAGCAAAATT
ACACATGTCGGTGTGAGACTATAGTTAGTTGCGACGGGTACGTCGTTAAAAGAATAGCTATCAGTC
CAGGCCTGTATGGGAAGCCTTCAGGCTATGCTGCTACGATGCACCGCGAGGGATTCTTGTGCTGCA
AAGTGACAGACACATTGAACGGGGAGAGGGTCTCTTTTCCCGTGTGCACGTATGTGCCAGCTACAT
TGTGTGACCAAATGACTGGCATACTGGCAACAGATGTCAGTGCGGACGACGCGCAAAAACTGCTG
GTTGGGCTCAACCAGCGTATAGTCGTCAACGGTCGCACCCAGAGAAACACCAATACCATGAAAAAT
TACCTTTTGCCCGTAGTGGCCCAGGCATTTGCTAGGTGGGCAAAGGAATATAAGGAAGATCAAGAA
GATGAAAGGCCACTAGGACTACGAGATAGACAGTTAGTCATGGGGTGTTGTTGGGCTTTTAGAAGG
CACAAGATAACATCTATTTATAAGCGCCCGGATACCCAAACCATCATCAAAGTGAACAGCGATTTC
CACTCATTCGTGCTGCCCAGGATAGGCAGTAACACATTGGAGATCGGGCTGAGAACAAGAATCAG
GAAAATGTTAGAGGAGCACAAGGAGCCGTCACCTCTCATTACCGCCGAGGACGTACAAGAAGCTA
AGTGCGCAGCCGATGAGGCTAAGGAGGTGCGTGAAGCCGAGGAGTTGCGCGCAGCTCTACCACCT
TTGGCAGCTGATGTTGAGGAGCCCACTCTGGAAGCCGATGTCGACTTGATGTTACAAGAGGCTGGG
GCCGGCTCAGTGGAGACACCTCGTGGCTTGATAAAGGTTACCAGCTACGATGGCGAGGACAAGATC
GGCTCTTACGCTGTGCTTTCTCCGCAGGCTGTACTCAAGAGTGAAAAATTATCTTGCATCCACCCTC
TCGCTGAACAAGTCATAGTGATAACACACTCTGGCCGAAAAGGGCGTTATGCCGTGGAACCATACC
ATGGTAAAGTAGTGGTGCCAGAGGGACATGCAATACCCGTCCAGGACTTTCAAGCTCTGAGTGAAA
GTGCCACCATTGTGTACAACGAACGTGAGTTCGTAAACAGGTACCTGCACCATATTGCCACACATG
GAGGAGCGCTGAACACTGATGAAGAATATTACAAAACTGTCAAGCCCAGCGAGCACGACGGCGAA
TACCTGTACGACATCGACAGGAAACAGTGCGTCAAGAAAGAACTAGTCACTGGGCTAGGGCTCAC
AGGCGAGCTGGTGGATCCTCCCTTCCATGAATTCGCCTACGAGAGTCTGAGAACACGACCAGCCGC
TCCTTACCAAGTACCAACCATAGGGGTGTATGGCGTGCCAGGATCAGGCAAGTCTGGCATCATTAA
AAGCGCAGTCACCAAAAAAGATCTAGTGGTGAGCGCCAAGAAAGAAAACTGTGCAGAAATTATAA
GGGACGTCAAGAAAATGAAAGGGCTGGACGTCAATGCCAGAACTGTGGACTCAGTGCTCTTGAAT
GGATGCAAACACCCCGTAGAGACCCTGTATATTGACGAAGCTTTTGCTTGTCATGCAGGTACTCTCA
GAGCGCTCATAGCCATTATAAGACCTAAAAAGGCAGTGCTCTGCGGGGATCCCAAACAGTGCGGTT
TTTTTAACATGATGTGCCTGAAAGTGCATTTTAACCACGAGATTTGCACACAAGTCTTCCACAAAAG
CATCTCTCGCCGTTGCACTAAATCTGTGACTTCGGTCGTCTCAACCTTGTTTTACGACAAAAAAATG
AGAACGACGAATCCGAAAGAGACTAAGATTGTGATTGACACTACCGGCAGTACCAAACCTAAGCA
GGACGATCTCATTCTCACTTGTTTCAGAGGGTGGGTGAAGCAGTTGCAAATAGATTACAAAGGCAA
CGAAATAATGACGGCAGCTGCCTCTCAAGGGCTGACCCGTAAAGGTGTGTATGCCGTTCGGTACAA
GGTGAATGAAAATCCTCTGTACGCACCCACCTCAGAACATGTGAACGTCCTACTGACCCGCACGGA
GGACCGCATCGTGTGGAAAACACTAGCCGGCGACCCATGGATAAAAACACTGACTGCCAAGTACC
CTGGGAATTTCACTGCCACGATAGAGGAGTGGCAAGCAGAGCATGATGCCATCATGAGGCACATCT
TGGAGAGACCGGACCCTACCGACGTCTTCCAGAATAAGGCAAACGTGTGTTGGGCCAAGGCTTTAG
TGCCGGTGCTGAAGACCGCTGGCATAGACATGACCACTGAACAATGGAACACTGTGGATTATTTTG
AAACGGACAAAGCTCACTCAGCAGAGATAGTATTGAACCAACTATGCGTGAGGTTCTTTGGACTCG
ATCTGGACTCCGGTCTATTTTCTGCACCCACTGTTCCGTTATCCATTAGGAATAATCACTGGGATAA
CTCCCCGTCGCCTAACATGTACGGGCTGAATAAAGAAGTGGTCCGTCAGCTCTCTCGCAGGTACCC
ACAACTGCCTCGGGCAGTTGCCACTGGAAGAGTCTATGACATGAACACTGGTACACTGCGCAATTA
TGATCCGCGCATAAACCTAGTACCTGTAAACAGAAGACTGCCTCATGCTTTAGTCCTCCACCATAAT
GAACACCCACAGAGTGACTTTTCTTCATTCGTCAGCAAATTGAAGGGCAGAACTGTCCTGGTGGTC
GGGGAAAAGTTGTCCGTCCCAGGCAAAATGGTTGACTGGTTGTCAGACCGGCCTGAGGCTACCTTC
AGAGCTCGGCTGGATTTAGGCATCCCAGGTGATGTGCCCAAATATGACATAATATTTGTTAATGTG
AGGACCCCATATAAATACCATCACTATCAGCAGTGTGAAGACCATGCCATTAAGCTTAGCATGTTG
ACCAAGAAAGCTTGTCTGCATCTGAATCCCGGCGGAACCTGTGTCAGCATAGGTTATGGTTACGCT
GACAGGGCCAGCGAAAGCATCATTGGTGCTATAGCGCGGCAGTTCAAGTTTTCCCGGGTATGCAAA
CCGAAATCCTCACTTGAAGAGACGGAAGTTCTGTTTGTATTCATTGGGTACGATCGCAAGGCCCGT
ACGCACAATCCTTACAAGCTTTCATCAACCTTGACCAACATTTATACAGGTTCCAGACTCCACGAAG
CCGGATGTGCACCCTCATATCATGTGGTGCGAGGGGATATTGCCACGGCCACCGAAGGAGTGATTA
TAAATGCTGCTAACAGCAAAGGACAACCTGGCGGAGGGGTGTGCGGAGCGCTGTATAAGAAATTC
CCGGAAAGCTTCGATTTACAGCCGATCGAAGTAGGAAAAGCGCGACTGGTCAAAGGTGCAGCTAA
ACATATCATTCATGCCGTAGGACCAAACTTCAACAAAGTTTCGGAGGTTGAAGGTGACAAACAGTT
GGCAGAGGCTTATGAGTCCATCGCTAAGATTGTCAACGATAACAATTACAAGTCAGTAGCGATTCC
ACTGTTGTCCACCGGCATCTTTTCCGGGAACAAAGATCGACTAACCCAATCATTGAACCATTTGCTG
ACAGCTTTAGACACCACTGATGCAGATGTAGCCATATACTGCAGGGACAAGAAATGGGAAATGAC
TCTCAAGGAAGCAGTGGCTAGGAGAGAAGCAGTGGAGGAGATATGCATATCCGACGACTCTTCAG
TGACAGAACCTGATGCAGAGCTGGTGAGGGTGCATCCGAAGAGTTCTTTGGCTGGAAGGAAGGGC
TACAGCACAAGCGATGGCAAAACTTTCTCATATTTGGAAGGGACCAAGTTTCACCAGGCGGCCAAG
GATATAGCAGAAATTAATGCCATGTGGCCCGTTGCAACGGAGGCCAATGAGCAGGTATGCATGTAT
ATCCTCGGAGAAAGCATGAGCAGTATTAGGTCGAAATGCCCCGTCGAAGAGTCGGAAGCCTCCAC
ACCACCTAGCACGCTGCCTTGCTTGTGCATCCATGCCATGACTCCAGAAAGAGTACAGCGCCTAAA
AGCCTCACGTCCAGAACAAATTACTGTGTGCTCATCCTTTCCATTGCCGAAGTATAGAATCACTGGT
GTGCAGAAGATCCAATGCTCCCAGCCTATATTGTTCTCACCGAAAGTGCCTGCGTATATTCATCCAA
GGAAGTATCTCGTGGAAACACCACCGGTAGACGAGACTCCGGAGCCATCGGCAGAGAACCAATCC
ACAGAGGGGACACCTGAACAACCACCACTTATAACCGAGGATGAGACCAGGACTAGAACGCCTGA
GCCGATCATCATCGAAGAGGAAGAAGAGGATAGCATAAGTTTGCTGTCAGATGGCCCGACCCACC
AGGTGCTGCAAGTCGAGGCAGACATTCACGGGCCGCCCTCTGTATCTAGCTCATCCTGGTCCATTCC
TCATGCATCCGACTTTGATGTGGACAGTTTATCCATACTTGACACCCTGGAGGGAGCTAGCGTGACC
AGCGGGGCAACGTCAGCCGAGACTAACTCTTACTTCGCAAAGAGTATGGAGTTTCTGGCGCGACCG
GTGCCTGCGCCTCGAACAGTATTCAGGAACCCTCCACATCCCGCTCCGCGCACAAGAACACCGTCA
CTTGCACCCAGCAGGGCCTGCTCGAGAACCAGCCTAGTTTCCACCCCGCCAGGCGTGAATAGGGTG
ATCACTAGAGAGGAGCTCGAGGCGCTTACCCCGTCACGCACTCCTAGCAGGTCGGTCTCGAGAACC
AGCCTGGTCTCCAACCCGCCAGGCGTAAATAGGGTGATTACAAGAGAGGAGTTTGAGGCGTTCGTA
GCACAACAACAATGACGGTTTGATGCGGGTGCATACATCTTTTCCTCCGACACCGGTCAAGGGCAT
TTACAACAAAAATCAGTAAGGCAAACGGTGCTATCCGAAGTGGTGTTGGAGAGGACCGAATTGGA
GATTTCGTATGCCCCGCGCCTCGACCAAGAAAAAGAAGAATTACTACGCAAGAAATTACAGTTAAA
TCCCACACCTGCTAACAGAAGCAGATACCAGTCCAGGAAGGTGGAGAACATGAAAGCCATAACAG
CTAGACGTATTCTGCAAGGCCTAGGGCATTATTTGAAGGCAGAAGGAAAAGTGGAGTGCTACCGA
ACCCTGCATCCTGTTCCTTTGTATTCATCTAGTGTGAACCGTGCCTTTTCAAGCCCCAAGGTCGCAG
TGGAAGCCTGTAACGCCATGTTGAAAGAGAACTTTCCGACTGTGGCTTCTTACTGTATTATTCCAGA
GTACGATGCCTATTTGGACATGGTTGACGGAGCTTCATGCTGCTTAGACACTGCCAGTTTTTGCCCT
GCAAAGCTGCGCAGCTTTCCAAAGAAACACTCCTATTTGGAACCCACAATACGATCGGCAGTGCCT
TCAGCGATCCAGAACACGCTCCAGAACGTCCTGGCAGCTGCCACAAAAAGAAATTGCAATGTCACG
CAAATGAGAGAATTGCCCGTATTGGATTCGGCGGCCTTTAATGTGGAATGCTTCAAGAAATATGCG
TGTAATAATGAATATTGGGAAACGTTTAAAGAAAACCCCATCAGGCTTACTGAAGAAAACGTGGTA
AATTACATTACCAAATTAAAAGGACCAAAAGCTGCTGCTCTTTTTGCGAAGACACATAATTTGAAT
ATGTTGCAGGACATACCAATGGACAGGTTTGTAATGGACTTAAAGAGAGACGTGAAAGTGACTCCA
GGAACAAAACATACTGAAGAACGGCCCAAGGTACAGGTGATCCAGGCTGCCGATCCGCTAGCAAC
AGCGTATCTGTGCGGAATCCACCGAGAGCTGGTTAGGAGATTAAATGCGGTCCTGCTTCCGAACAT
TCATACACTGTTTGATATGTCGGCTGAAGACTTTGACGCTATTATAGCCGAGCACTTCCAGCCTGGG
GATTGTGTTCTGGAAACTGACATCGCGTCGTTTGATAAAAGTGAGGACGACGCCATGGCTCTGACC
GCGTTAATGATTCTGGAAGACTTAGGTGTGGACGCAGAGCTGTTGACGCTGATTGAGGCGGCTTTC
GGCGAAATTTCATCAATACATTTGCCCACTAAAACTAAATTTAAATTCGGAGCCATGATGAAATCT
GGAATGTTCCTCACACTGTTTGTGAACACAGTCATTAACATTGTAATCGCAAGCAGAGTGTTGAGA
GAACGGCTAACCGGATCACCATGTGCAGCATTCATTGGAGATGACAATATCGTGAAAGGAGTCAA
ATCGGACAAATTAATGGCAGACAGGTGCGCCACCTGGTTGAATATGGAAGTCAAGATTATAGATGC
TGTGGTGGGCGAGAAAGCGCCTTATTTCTGTGGAGGGTTTATTTTGTGTGACTCCGTGACCGGCACA
GCGTGCCGTGTGGCAGACCCCCTAAAAAGGCTGTTTAAGCTTGGCAAACCTCTGGCAGCAGACGAT
GAACATGATGATGACAGGAGAAGGGCATTGCATGAAGAGTCAACACGCTGGAACCGAGTGGGTAT
TCTTTCAGAGCTGTGCAAGGCAGTAGAATCAAGGTATGAAACCGTAGGAACTTCCATCATAGTTAT
GGCCATGACTACTCTAGCTAGCAGTGTTAAATCATTCAGCTACCTGAGAGGGGCCCCTATAACTCTC
TACGGCTAACCTGAATGGACTACGACATAGTCTAGTCCGCCAAGATGTTCCCGTTCCAGCCAATGT
ATCCGATGCAGCCAATGCCCTATCGCAACCCGTTCGCGGCCCCGCGCAGGCCCTGGTTCCCCAGAA
CCGACCCTTTTCTGGCGATGCAGGTGCAGGAATTAACCCGCTCGATGGCTAACCTGACGTTCAAGC
AACGCCGGGACGCGCCACCTGAGGGGCCATCCGCTAAGAAACCGAAGAAGGAGGCCTCGCAAAAA
CAGAAAGGGGGAGGCCAAGGGAAGAAGAAGAAGAACCAAGGGAAGAAGAAGGCTAAGACAGGG
CCGCCTAATCCGAAGGCACAGAATGGAAACAAGAAGAAGACCAACAAGAAACCAGGCAAGAGAC
AGCGCATGGTCATGAAATTGGAATCTGACAAGACGTTCCCAATCATGTTGGAAGGGAAGATAAAC
GGCTACGCTTGTGTGGTCGGAGGGAAGTTATTCAGGCCGATGCATGTGGAAGGCAAGATCGACAAC
GACGTTCTGGCCGCGCTTAAGACGAAGAAAGCATCCAAATACGATCTTGAGTATGCAGATGTGCCA
CAGAACATGCGGGCCGATACATTCAAATACACCCATGAGAAACCCCAAGGCTATTACAGCTGGCAT
CATGGAGCAGTCCAATATGAAAATGGGCGTTTCACGGTGCCGAAAGGAGTTGGGGCCAAGGGAGA
CAGCGGACGACCCATTCTGGATAACCAGGGACGGGTGGTCGCTATTGTGCTGGGAGGTGTGAATGA
AGGATCTAGGACAGCCCTTTCAGTCGTCATGTGGAACGAGAAGGGAGTTACCGTGAAGTATACTCC
GGAGAACTGCGAGCAATGGTCACTAGTGACCACCATGTGTCTGCTCGCCAATGTGACGTTCCCATG
TGCTCAACCACCAATTTGCTACGACAGAAAACCAGCAGAGACTTTGGCCATGCTCAGCGTTAACGT
TGACAACCCGGGCTACGATGAGCTGCTGGAAGCAGCTGTTAAGTGCCCCGGAAGGAAAAGGAGAT
CCACCGAGGAGCTGTTTAATGAGTATAAGCTAACGCGCCCTTACATGGCCAGATGCATCAGATGTG
CAGTTGGGAGCTGCCATAGTCCAATAGCAATCGAGGCAGTAAAGAGCGACGGGCACGACGGTTAT
GTTAGACTTCAGACTTCCTCGCAGTATGGCCTGGATTCCTCCGGCAACTTAAAGGGCAGGACCATG
CGGTATGACATGCACGGGACCATTAAAGAGATACCACTACATCAAGTGTCACTCTATACATCTCGC
CCGTGTCACATTGTGGATGGGCACGGTTATTTCCTGCTTGCCAGGTGCCCGGCAGGGGACTCCATCA
CCATGGAATTTAAGAAAGATTCCGTCAGACACTCCTGCTCGGTGCCGTATGAAGTGAAATTTAATC
CTGTAGGCAGAGAACTCTATACTCATCCCCCAGAACACGGAGTAGAGCAAGCGTGCCAAGTCTACG
CACATGATGCACAGAACAGAGGAGCTTATGTCGAGATGCACCTCCCGGGCTCAGAAGTGGACAGC
AGTTTGGTTTCCTTGAGCGGCAGTTCAGTCACCGTGACACCTCCTGATGGGACTAGCGCCCTGGTGG
AATGCGAGTGTGGCGGCACAAAGATCTCCGAGACCATCAACAAGACAAAACAGTTCAGCCAGTGC
ACAAAGAAGGAGCAGTGCAGAGCATATCGGCTGCAGAACGATAAGTGGGTGTATAATTCTGACAA
ACTGCCCAAAGCAGCGGGAGCCACCTTAAAAGGAAAACTGCATGTCCCATTCTTGCTGGCAGACGG
CAAATGCACCGTGCCTCTAGCACCAGAACCTATGATAACCTTCGGTTTCAGATCAGTGTCACTGAA
ACTGCACCCTAAGAATCCCACATATCTAATCACCCGCCAACTTGCTGATGAGCCTCACTACACGCA
CGAGCTCATATCTGAACCAGCTGTTAGGAATTTTACCGTCACCGAAAAAGGGTGGGAGTTTGTATG
GGGAAACCACCCGCCGAAAAGGTTTTGGGCACAGGAAACAGCACCCGGAAATCCACATGGGCTAC
CGCACGAGGTGATAACTCATTATTACCACAGATACCCTATGTCCACCATCCTGGGTTTGTCAATTTG
TGCCGCCATTGCAACCGTTTCCGTTGCAGCGTCTACCTGGCTGTTTTGCAGATCTAGAGTTGCGTGC
CTAACTCCTTACCGGCTAACACCTAACGCTAGGATACCATTTTGTCTGGCTGTGCTTTGCTGCGCCC
GCACTGCCCGGGCCGAGACCACCTGGGAGTCCTTGGATCACCTATGGAACAATAACCAACAGATGT
TCTGGATTCAATTGCTGATCCCTCTGGCCGCCTTGATCGTAGTGACTCGCCTGCTCAGGTGCGTGTG
CTGTGTCGTGCCTTTTTTAGTCATGGCCGGCGCCGCAGGCGCCGGCGCCTACGAGCACGCGACCAC
GATGCCGAGCCAAGCGGGAATCTCGTATAACACTATAGTCAACAGAGCAGGCTACGCACCACTCCC
TATCAGCATAACACCAACAAAGATCAAGCTGATACCTACAGTGAACTTGGAGTACGTCACCTGCCA
CTACAAAACAGGAATGGATTCACCAGCCATCAAATGCTGCGGATCTCAGGAATGCACTCCAACTTA
CAGGCCTGATGAACAGTGCAAAGTCTTCACAGGGGTTTACCCGTTCATGTGGGGTGGTGCATATTG
CTTTTGCGACACTGAGAACACCCAAGTCAGCAAGGCCTACGTAATGAAATCTGACGACTGCCTTGC
GGATCATGCTGAAGCATATAAAGCGCACACAGCCTCAGTGCAGGCGTTCCTCAACATCACAGTGGG
AGAACACTCTATTGTGACTACCGTGTATGTGAATGGAGAAACTCCTGTGAATTTCAATGGGGTCAA
AATAACTGCAGGTCCGCTTTCCACAGCTTGGACACCCTTTGATCGCAAAATCGTGCAGTATGCCGG
GGAGATCTATAATTATGATTTTCCTGAGTATGGGGCAGGACAACCAGGAGCATTTGGAGATATACA
ATCCAGAACAGTCTCAAGCTCTGATCTGTATGCCAATACCAACCTAGTGCTGCAGAGACCCAAAGC
AGGAGCGATCCACGTGCCATACACTCAGGCACCTTCGGGTTTTGAGCAATGGAAGAAAGATAAAG
CTCCATCATTGAAATTTACCGCCCCTTTCGGATGCGAAATATATACAAACCCCATTCGCGCCGAAAA
CTGTGCTGTAGGGTCAATTCCATTAGCCTTTGACATTCCCGACGCCTTGTTCACCAGGGTGTCAGAA
ACACCGACACTTTCAGCGGCCGAATGCACTCTTAACGAGTGCGTGTATTCTTCCGACTTTGGTGGGA
TCGCCACGGTCAAGTACTCGGCCAGCAAGTCAGGCAAGTGCGCAGTCCATGTGCCATCAGGGACTG
CTACCCTAAAAGAAGCAGCAGTCGAGCTAACCGAGCAAGGGTCGGCGACTATCCATTTCTCGACCG
CAAATATCCACCCGGAGTTCAGGCTCCAAATATGCACATCATATGTTACGTGCAAAGGTGATTGTC
ACCCCCCGAAAGACCATATTGTGACACACCCTCAGTATCACGCCCAAACATTTACAGCCGCGGTGT
CAAAAACCGCGTGGACGTGGTTAACATCCCTGCTGGGAGGATCAGCCGTAATTATTATAATTGGCT
TGGTGCTGGCTACTATTGTGGCCATGTACGTGCTGACCAACCAGAAACATAATTGAATACAGCAGC
AATTGGCAAGCTGCTTACATAGAACTCGCGGCGATTGGCATGCCGCCTTAAAATTTTTATTTTATTT
TTCTTTTCTTTTCCGAATCGGATTTTGTTTTTAATATTTC
VEE Production Vector (SEQ ID NO: 8); VEE genome with nucleotides 7544-11175 deleted, plus 5′
T7-promoter, plus 3′ restriction sites
TAATACGACTCACTATAGGATGggcggcgcatgagagaagcccagaccaattacctacccaaaATGGagaaagttcacgttgacatcga
ggaagacagcccattcctcagagctttgcagcggagcttcccgcagtttgaggtagaagccaagcaggtcactgataatgaccatgctaatgcca
gagcgttttcgcatctggcttcaaaactgatcgaaacggaggtggacccatccgacacgatccttgacattggaagtgcgcccgcccgcagaatg
tattctaagcacaagtatcattgtatctgtccgatgagatgtgcggaagatccggacagattgtataagtatgcaactaagctgaagaaaaactg
taaggaaataactgataaggaattggacaagaaaatgaaggagctcgccgccgtcatgagcgaccctgacctggaaactgagactatgtgcctcc
acgacgacgagtcgtgtcgctacgaagggcaagtcgctgtttaccaggatgtatacgcggttgacggaccgacaagtctctatcaccaagccaat
aagggagttagagtcgcctactggataggctttgacaccaccccttttatgtttaagaacttggctggagcatatccatcatactctaccaactg
ggccgacgaaaccgtgttaacggctcgtaacataggcctatgcagctctgacgttatggagcggtcacgtagagggatgtccattcttagaaaga
agtatttgaaaccatccaacaatgttctattctctgttggctcgaccatctaccacgagaagagggacttactgaggagctggcacctgccgtct
gtatttcacttacgtggcaagcaaaattacacatgtcggtgtgagactatagttagttgcgacgggtacgtcgttaaaagaatagctatcagtcc
aggcctgtatgggaagccttcaggctatgctgctacgatgcaccgcgagggattcttgtgctgcaaagtgacagacacattgaacggggagaggg
tctcttttcccgtgtgcacgtatgtgccagctacattgtgtgaccaaatgactggcatactggcaacagatgtcagtgcggacgacgcgcaaaaa
ctgctggttgggctcaaccagcgtatagtcgtcaacggtcgcacccagagaaacaccaataccatgaaaaattaccttttgcccgtagtggccca
ggcatttgctaggtgggcaaaggaatataaggaagatcaagaagatgaaaggccactaggactacgagatagacagttagtcatggggtgttgtt
gggcttttagaaggcacaagataacatctatttataagcgcccggatacccaaaccatcatcaaagtgaacagcgatttccactcattcgtgctg
cccaggataggcagtaacacattggagatcgggctgagaacaagaatcaggaaaatgttagaggagcacaaggagccgtcacctctcattaccgc
cgaggacgtacaagaagctaagtgcgcagccgatgaggctaaggaggtgcgtgaagccgaggagttgcgcgcagctctaccacctttggcagctg
atgttgaggagcccactctggaagccgatgtcgacttgatgttacaagaggctggggccggctcagtggagacacctcgtggcttgataaaggtt
accagctacgctggcgaggacaagatcggctcttacgctgtgctttctccgcaggctgtactcaagagtgaaaaattatcttgcatccaccctct
cgctgaacaagtcatagtgataacacactctggccgaaaagggcgttatgccgtggaaccataccatggtaaagtagtggtgccagagggacatg
caatacccgtccaggactttcaagctctgagtgaaagtgccaccattgtgtacaacgaacgtgagttcgtaaacaggtacctgcaccatattgcc
acacatggaggagcgctgaacactgatgaagaatattacaaaactgtcaagcccagcgagcacgacggcgaatacctgtacgacatcgacaggaa
acagtgcgtcaagaaagaactagtcactgggctagggctcacaggcgagctggtggatcctcccttccatgaattcgcctacgagagtctgagaa
cacgaccagccgctccttaccaagtaccaaccataggggtgtatggcgtgccaggatcaggcaagtctggcatcattaaaagcgcagtcaccaaa
aaagatctagtggtgagcgccaagaaagaaaactgtgcagaaattataagggacgtcaagaaaatgaaagggctggacgtcaatgccagaactgt
ggactcagtgctcttgaatggatgcaaacaccccgtagagaccctgtatattgacgaagcttttgcttgtcatgcaggtactctcagagcgctca
tagccattataagacctaaaaaggcagtgctctgcggggatcccaaacagtgcggtttttttaacatgatgtgcctgaaagtgcattttaaccac
gagatttgcacacaagtcttccacaaaagcatctctcgccgttgcactaaatctgtgacttcggtcgtctcaaccttgttttacgacaaaaaaat
gagaacgacgaatccgaaagagactaagattgtgattgacactaccggcagtaccaaacctaagcaggacgatctcattctcacttgtttcagag
gggggtgaagcagttgcaaatagattacaaaggcaacgaaataatgacggcagctgcctctcaagggctgacccgtaaaggtgtgtatgccgttc
ggtacaaggtgaatgaaaatcctctgtacgcacccacctcagaacatgtgaacgtcctactgacccgcacggaggaccgcatcgtgtggaaaaca
ctagccggcgacccatggataaaaacactgactgccaagtaccctgggaatttcactgccacgatagaggagtggcaagcagagcatgatgccat
catgaggcacatcttggagagaccggaccctaccgacgtcttccagaataaggcaaacgtgtgttgggccaaggctttagtgccggtgctgaaga
ccgctggcatagacatgaccactgaacaatggaacactgtggattattttgaaacggacaaagctcactcagcagagatagtattgaaccaacta
tgcgtgaggttctttggactcgatctggactccggtctattttctgcacccactgttccgttatccattaggaataatcactgggataactcccc
gtcgcctaacatgtacgggctgaataaagaagtggtccgtcagctctctcgcaggtacccacaactgcctcgggcagttgccactggaagagtct
atgacatgaacactggtacactgcgcaattatgatccgcgcataaacctagtacctgtaaacagaagactgcctcatgctttagtcctccaccat
aatgaacacccacagagtgacttttcttcattcgtcagcaaattgaagggcagaactgtcctggtggtcggggaaaagttgtccgtcccaggcaa
aatggttgactggttgtcagaccggcctgaggctaccttcagagctcggctggatttaggcatcccaggtgatgtgcccaaatatgacataatat
ttgttaatgtgaggaccccatataaataccatcactatcagcagtgtgaagaccatgccattaagcttagcatgttgaccaagaaagcttgtctg
catctgaatcccggcggaacctgtgtcagcataggttatggttacgctgacagggccagcgaaagcatcattggtgctatagcgcggcagttcaa
gttttcccgggtatgcaaaccgaaatcctcacttgaagagacggaagttctgtttgtattcattgggtacgatcgcaaggcccgtacgcacaatc
cttacaagctttcatcaaccttgaccaacatttatacaggttccagactccacgaagccggatgtgcaccctcatatcatgtggtgcgaggggat
attgccacggccaccgaaggagtgattataaatgctgctaacagcaaaggacaacctggcggaggggtgtgcggagcgctgtataagaaattccc
ggaaagcttcgatttacagccgatcgaagtaggaaaagcgcgactggtcaaaggtgcagctaaacatatcattcatgccgtaggaccaaacttca
acaaagtttcggaggttgaaggtgacaaacagttggcagaggcttatgagtccatcgctaagattgtcaacgataacaattacaagtcagtagcg
attccactgttgtccaccggcatcttttccgggaacaaagatcgactaacccaatcattgaaccatttgctgacagctttagacaccactgatgc
agatgtagccatatactgcagggacaagaaatgggaaatgactctcaaggaagcagtggctaggagagaagcagtggaggagatatgcatatccg
acgactcttcagtgacagaacctgatgcagagctggtgagggtgcatccgaagagttctttggctggaaggaagggctacagcacaagcgatggc
aaaactttctcatatttggaagggaccaagtttcaccaggcggccaaggatatagcagaaattaatgccatgtggcccgttgcaacggaggccaa
tgagcaggtatgcatgtatatcctcggagaaagcatgagcagtattaggtcgaaatgccccgtcgaagagtcggaagcctccacaccacctagca
cgctgccttgcttgtgcatccatgccatgactccagaaagagtacagcgcctaaaagcctcacgtccagaacaaattactgtgtgctcatccttt
ccattgccgaagtatagaatcactggtgtgcagaagatccaatgctcccagcctatattgttctcaccgaaagtgcctgcgtatattcatccaag
gaagtatctcgtggaaacaccaccggtagacgagactccggagccatcggcagagaaccaatccacagaggggacacctgaacaaccaccactta
taaccgaggatgagaccaggactagaacgcctgagccgatcatcatcgaagaggaagaagaggatagcataagtttgctgtcagatggcccgacc
caccaggtgctgcaagtcgaggcagacattcacgggccgccctctgtatctagctcatcctggtccattcctcatgcatccgactttgatgtgga
cagtttatccatacttgacaccctggagggagctagcgtgaccagcggggcaacgtcagccgagactaactcttacttcgcaaagagtatggagt
ttctggcgcgaccggtgcctgcgcctcgaacagtattcaggaaccctccacatcccgctccgcgcacaagaacaccgtcacttgcacccagcagg
gcctgctcgagaaccagcctagtttccaccccgccaggcgtgaatagggtgatcactagagaggagctcgaggcgcttaccccgtcacgcactcc
tagcaggtcggtctcgagaaccagcctggtctccaacccgccaggcgtaaatagggtgattacaagagaggagtttgaggcgttcgtagcacaac
aacaatgacggtttgatgcgggtgcatacatcttttcctccgacaccggtcaagggcatttacaacaaaaatcagtaaggcaaacggtgctatcc
gaagtggtgttggagaggaccgaattggagatttcgtatgccccgcgcctcgaccaagaaaaagaagaattactacgcaagaaattacagttaaa
tcccacacctgctaacagaagcagataccagtccaggaaggtggagaacatgaaagccataacagctagacgtattctgcaaggcctagggcatt
atttgaaggcagaaggaaaagtggagtgctaccgaaccctgcatcctgttcctttgtattcatctagtgtgaaccgtgccttttcaagccccaag
gtcgcagtggaagcctgtaacgccatgttgaaagagaactttccgactgtggcttcttactgtattattccagagtacgatgcctatttggacat
ggttgacggagcttcatgctgcttagacactgccagtttttgccctgcaaagctgcgcagctttccaaagaaacactcctatttggaacccacaa
tacgatcggcagtgccttcagcgatccagaacacgctccagaacgtcctggcagctgccacaaaaagaaattgcaatgtcacgcaaatgagagaa
ttgcccgtattggattcggcggcctttaatgtggaatgcttcaagaaatatgcgtgtaataatgaatattgggaaacgtttaaagaaaaccccat
caggcttactgaagaaaacgtggtaaattacattaccaaattaaaaggaccaaaagctgctgctctttttgcgaagacacataatttgaatatgt
tgcaggacataccaatggacaggtttgtaatggacttaaagagagacgtgaaagtgactccaggaacaaaacatactgaagaacggcccaaggta
caggtgatccaggctgccgatccgctagcaacagcgtatctgtgcggaatccaccgagagctggttaggagattaaatgcggtcctgcttccgaa
cattcatacactgtttgatatgtcggctgaagactttgacgctattatagccgagcacttccagcctggggattgtgttctggaaactgacatcg
cgtcgtttgataaaagtgaggacgacgccatggctctgaccgcgttaatgattctggaagacttaggtgtggacgcagagctgttgacgctgatt
gaggcggctttcggcgaaatttcatcaatacatttgcccactaaaactaaatttaaattcggagccatgatgaaatctggaatgttcctcacact
gtttgtgaacacagtcattaacattgtaatcgcaagcagagtgttgagagaacggctaaccggatcaccatgtgcagcattcattggagatgaca
atatcgtgaaaggagtcaaatcggacaaattaatggcagacaggtgcgccacctggttgaatatggaagtcaagattatagatgctgtggtgggc
gagaaagcgccttatttctgtggagggtttattttgtgtgactccgtgaccggcacagcgtgccgtgtggcagaccccctaaaaaggctgtttaa
gcttggcaaacctctggcagcagacgatgaacatgatgatgacaggagaagggcattgcatgaagagtcaacacgctggaaccgagtgggtattc
tttcagagctgtgcaaggcagtagaatcaaggtatgaaaccgtaggaacttccatcatagttatggccatgactactctagctagcagtgttaaa
tcattcagctacctgagaggggcccctataactctctacggcTAAcctgaatggactacgacgtatcacgcccaaacatttacagccgcggtgtc
aaaaaccgcgtggacgtggttaacatccctgctgggaggatcagccgtaattattataattggcttggtgctggctactattgtggccatgtacg
tgctgaccaaccagaaacataattgaatacagcagcaattggcaagctgcttacatagaactcgcggcgattggcatgccgccttaaaattttta
ttttattttttcttttcttttccgaatcggattttgtttttaatatttcAAAAAAAAAAAAAAAAAAAAAAAAAAAAAAAAAAAAAAAAAAAAAA
AAAAAAAAAAAAAAAAAAAAAAAAAAAAAAAAAA
TC-83 Production Vector(SEQ ID NO: 9); TC-83 genome with nucleotides 7544-11175 deleted, plus
5′ T7-promoter, plus 3′ restriction sites
ATAGGCGGCGCATGAGAGAAGCCCAGACCAATTACCTACCCAAAATGGAGAAAGTTCACGTTGAC
ATCGAGGAAGACAGCCCATTCCTCAGAGCTTTGCAGCGGAGCTTCCCGCAGTTTGAGGTAGAAGCC
AAGCAGGTCACTGATAATGACCATGCTAATGCCAGAGCGTTTTCGCATCTGGCTTCAAAACTGATC
GAAACGGAGGTGGACCCATCCGACACGATCCTTGACATTGGAAGTGCGCCCGCCCGCAGAATGTAT
TCTAAGCACAAGTATCATTGTATCTGTCCGATGAGATGTGCGGAAGATCCGGACAGATTGTATAAG
TATGCAACTAAGCTGAAGAAAAACTGTAAGGAAATAACTGATAAGGAATTGGACAAGAAAATGAA
GGAGCTCGCCGCCGTCATGAGCGACCCTGACCTGGAAACTGAGACTATGTGCCTCCACGACGACGA
GTCGTGTCGCTACGAAGGGCAAGTCGCTGTTTACCAGGATGTATACGCGGTTGACGGACCGACAAG
TCTCTATCACCAAGCCAATAAGGGAGTTAGAGTCGCCTACTGGATAGGCTTTGACACCACCCCTTTT
ATGTTTAAGAACTTGGCTGGAGCATATCCATCATACTCTACCAACTGGGCCGACGAAACCGTGTTA
ACGGCTCGTAACATAGGCCTATGCAGCTCTGACGTTATGGAGCGGTCACGTAGAGGGATGTCCATT
CTTAGAAAGAAGTATTTGAAACCATCCAACAATGTTCTATTCTCTGTTGGCTCGACCATCTACCACG
AGAAGAGGGACTTACTGAGGAGCTGGCACCTGCCGTCTGTATTTCACTTACGTGGCAAGCAAAATT
ACACATGTCGGTGTGAGACTATAGTTAGTTGCGACGGGTACGTCGTTAAAAGAATAGCTATCAGTC
CAGGCCTGTATGGGAAGCCTTCAGGCTATGCTGCTACGATGCACCGCGAGGGATTCTTGTGCTGCA
AAGTGACAGACACATTGAACGGGGAGAGGGTCTCTTTTCCCGTGTGCACGTATGTGCCAGCTACAT
TGTGTGACCAAATGACTGGCATACTGGCAACAGATGTCAGTGCGGACGACGCGCAAAAACTGCTG
GTTGGGCTCAACCAGCGTATAGTCGTCAACGGTCGCACCCAGAGAAACACCAATACCATGAAAAAT
TACCTTTTGCCCGTAGTGGCCCAGGCATTTGCTAGGTGGGCAAAGGAATATAAGGAAGATCAAGAA
GATGAAAGGCCACTAGGACTACGAGATAGACAGTTAGTCATGGGGTGTTGTTGGGCTTTTAGAAGG
CACAAGATAACATCTATTTATAAGCGCCCGGATACCCAAACCATCATCAAAGTGAACAGCGATTTC
CACTCATTCGTGCTGCCCAGGATAGGCAGTAACACATTGGAGATCGGGCTGAGAACAAGAATCAG
GAAAATGTTAGAGGAGCACAAGGAGCCGTCACCTCTCATTACCGCCGAGGACGTACAAGAAGCTA
AGTGCGCAGCCGATGAGGCTAAGGAGGTGCGTGAAGCCGAGGAGTTGCGCGCAGCTCTACCACCT
TTGGCAGCTGATGTTGAGGAGCCCACTCTGGAAGCCGATGTCGACTTGATGTTACAAGAGGCTGGG
GCCGGCTCAGTGGAGACACCTCGTGGCTTGATAAAGGTTACCAGCTACGATGGCGAGGACAAGATC
GGCTCTTACGCTGTGCTTTCTCCGCAGGCTGTACTCAAGAGTGAAAAATTATCTTGCATCCACCCTC
TCGCTGAACAAGTCATAGTGATAACACACTCTGGCCGAAAAGGGCGTTATGCCGTGGAACCATACC
ATGGTAAAGTAGTGGTGCCAGAGGGACATGCAATACCCGTCCAGGACTTTCAAGCTCTGAGTGAAA
GTGCCACCATTGTGTACAACGAACGTGAGTTCGTAAACAGGTACCTGCACCATATTGCCACACATG
GAGGAGCGCTGAACACTGATGAAGAATATTACAAAACTGTCAAGCCCAGCGAGCACGACGGCGAA
TACCTGTACGACATCGACAGGAAACAGTGCGTCAAGAAAGAACTAGTCACTGGGCTAGGGCTCAC
AGGCGAGCTGGTGGATCCTCCCTTCCATGAATTCGCCTACGAGAGTCTGAGAACACGACCAGCCGC
TCCTTACCAAGTACCAACCATAGGGGTGTATGGCGTGCCAGGATCAGGCAAGTCTGGCATCATTAA
AAGCGCAGTCACCAAAAAAGATCTAGTGGTGAGCGCCAAGAAAGAAAACTGTGCAGAAATTATAA
GGGACGTCAAGAAAATGAAAGGGCTGGACGTCAATGCCAGAACTGTGGACTCAGTGCTCTTGAAT
GGATGCAAACACCCCGTAGAGACCCTGTATATTGACGAAGCTTTTGCTTGTCATGCAGGTACTCTCA
GAGCGCTCATAGCCATTATAAGACCTAAAAAGGCAGTGCTCTGCGGGGATCCCAAACAGTGCGGTT
TTTTTAACATGATGTGCCTGAAAGTGCATTTTAACCACGAGATTTGCACACAAGTCTTCCACAAAAG
CATCTCTCGCCGTTGCACTAAATCTGTGACTTCGGTCGTCTCAACCTTGTTTTACGACAAAAAAATG
AGAACGACGAATCCGAAAGAGACTAAGATTGTGATTGACACTACCGGCAGTACCAAACCTAAGCA
GGACGATCTCATTCTCACTTGTTTCAGAGGGTGGGTGAAGCAGTTGCAAATAGATTACAAAGGCAA
CGAAATAATGACGGCAGCTGCCTCTCAAGGGCTGACCCGTAAAGGTGTGTATGCCGTTCGGTACAA
GGTGAATGAAAATCCTCTGTACGCACCCACCTCAGAACATGTGAACGTCCTACTGACCCGCACGGA
GGACCGCATCGTGTGGAAAACACTAGCCGGCGACCCATGGATAAAAACACTGACTGCCAAGTACC
CTGGGAATTTCACTGCCACGATAGAGGAGTGGCAAGCAGAGCATGATGCCATCATGAGGCACATCT
TGGAGAGACCGGACCCTACCGACGTCTTCCAGAATAAGGCAAACGTGTGTTGGGCCAAGGCTTTAG
TGCCGGTGCTGAAGACCGCTGGCATAGACATGACCACTGAACAATGGAACACTGTGGATTATTTTG
AAACGGACAAAGCTCACTCAGCAGAGATAGTATTGAACCAACTATGCGTGAGGTTCTTTGGACTCG
ATCTGGACTCCGGTCTATTTTCTGCACCCACTGTTCCGTTATCCATTAGGAATAATCACTGGGATAA
CTCCCCGTCGCCTAACATGTACGGGCTGAATAAAGAAGTGGTCCGTCAGCTCTCTCGCAGGTACCC
ACAACTGCCTCGGGCAGTTGCCACTGGAAGAGTCTATGACATGAACACTGGTACACTGCGCAATTA
TGATCCGCGCATAAACCTAGTACCTGTAAACAGAAGACTGCCTCATGCTTTAGTCCTCCACCATAAT
GAACACCCACAGAGTGACTTTTCTTCATTCGTCAGCAAATTGAAGGGCAGAACTGTCCTGGTGGTC
GGGGAAAAGTTGTCCGTCCCAGGCAAAATGGTTGACTGGTTGTCAGACCGGCCTGAGGCTACCTTC
AGAGCTCGGCTGGATTTAGGCATCCCAGGTGATGTGCCCAAATATGACATAATATTTGTTAATGTG
AGGACCCCATATAAATACCATCACTATCAGCAGTGTGAAGACCATGCCATTAAGCTTAGCATGTTG
ACCAAGAAAGCTTGTCTGCATCTGAATCCCGGCGGAACCTGTGTCAGCATAGGTTATGGTTACGCT
GACAGGGCCAGCGAAAGCATCATTGGTGCTATAGCGCGGCAGTTCAAGTTTTCCCGGGTATGCAAA
CCGAAATCCTCACTTGAAGAGACGGAAGTTCTGTTTGTATTCATTGGGTACGATCGCAAGGCCCGT
ACGCACAATCCTTACAAGCTTTCATCAACCTTGACCAACATTTATACAGGTTCCAGACTCCACGAAG
CCGGATGTGCACCCTCATATCATGTGGTGCGAGGGGATATTGCCACGGCCACCGAAGGAGTGATTA
TAAATGCTGCTAACAGCAAAGGACAACCTGGCGGAGGGGTGTGCGGAGCGCTGTATAAGAAATTC
CCGGAAAGCTTCGATTTACAGCCGATCGAAGTAGGAAAAGCGCGACTGGTCAAAGGTGCAGCTAA
ACATATCATTCATGCCGTAGGACCAAACTTCAACAAAGTTTCGGAGGTTGAAGGTGACAAACAGTT
GGCAGAGGCTTATGAGTCCATCGCTAAGATTGTCAACGATAACAATTACAAGTCAGTAGCGATTCC
ACTGTTGTCCACCGGCATCTTTTCCGGGAACAAAGATCGACTAACCCAATCATTGAACCATTTGCTG
ACAGCTTTAGACACCACTGATGCAGATGTAGCCATATACTGCAGGGACAAGAAATGGGAAATGAC
TCTCAAGGAAGCAGTGGCTAGGAGAGAAGCAGTGGAGGAGATATGCATATCCGACGACTCTTCAG
TGACAGAACCTGATGCAGAGCTGGTGAGGGTGCATCCGAAGAGTTCTTTGGCTGGAAGGAAGGGC
TACAGCACAAGCGATGGCAAAACTTTCTCATATTTGGAAGGGACCAAGTTTCACCAGGCGGCCAAG
GATATAGCAGAAATTAATGCCATGTGGCCCGTTGCAACGGAGGCCAATGAGCAGGTATGCATGTAT
ATCCTCGGAGAAAGCATGAGCAGTATTAGGTCGAAATGCCCCGTCGAAGAGTCGGAAGCCTCCAC
ACCACCTAGCACGCTGCCTTGCTTGTGCATCCATGCCATGACTCCAGAAAGAGTACAGCGCCTAAA
AGCCTCACGTCCAGAACAAATTACTGTGTGCTCATCCTTTCCATTGCCGAAGTATAGAATCACTGGT
GTGCAGAAGATCCAATGCTCCCAGCCTATATTGTTCTCACCGAAAGTGCCTGCGTATATTCATCCAA
GGAAGTATCTCGTGGAAACACCACCGGTAGACGAGACTCCGGAGCCATCGGCAGAGAACCAATCC
ACAGAGGGGACACCTGAACAACCACCACTTATAACCGAGGATGAGACCAGGACTAGAACGCCTGA
GCCGATCATCATCGAAGAGGAAGAAGAGGATAGCATAAGTTTGCTGTCAGATGGCCCGACCCACC
AGGTGCTGCAAGTCGAGGCAGACATTCACGGGCCGCCCTCTGTATCTAGCTCATCCTGGTCCATTCC
TCATGCATCCGACTTTGATGTGGACAGTTTATCCATACTTGACACCCTGGAGGGAGCTAGCGTGACC
AGCGGGGCAACGTCAGCCGAGACTAACTCTTACTTCGCAAAGAGTATGGAGTTTCTGGCGCGACCG
GTGCCTGCGCCTCGAACAGTATTCAGGAACCCTCCACATCCCGCTCCGCGCACAAGAACACCGTCA
CTTGCACCCAGCAGGGCCTGCTCGAGAACCAGCCTAGTTTCCACCCCGCCAGGCGTGAATAGGGTG
ATCACTAGAGAGGAGCTCGAGGCGCTTACCCCGTCACGCACTCCTAGCAGGTCGGTCTCGAGAACC
AGCCTGGTCTCCAACCCGCCAGGCGTAAATAGGGTGATTACAAGAGAGGAGTTTGAGGCGTTCGTA
GCACAACAACAATGACGGTTTGATGCGGGTGCATACATCTTTTCCTCCGACACCGGTCAAGGGCAT
TTACAACAAAAATCAGTAAGGCAAACGGTGCTATCCGAAGTGGTGTTGGAGAGGACCGAATTGGA
GATTTCGTATGCCCCGCGCCTCGACCAAGAAAAAGAAGAATTACTACGCAAGAAATTACAGTTAAA
TCCCACACCTGCTAACAGAAGCAGATACCAGTCCAGGAAGGTGGAGAACATGAAAGCCATAACAG
CTAGACGTATTCTGCAAGGCCTAGGGCATTATTTGAAGGCAGAAGGAAAAGTGGAGTGCTACCGA
ACCCTGCATCCTGTTCCTTTGTATTCATCTAGTGTGAACCGTGCCTTTTCAAGCCCCAAGGTCGCAG
TGGAAGCCTGTAACGCCATGTTGAAAGAGAACTTTCCGACTGTGGCTTCTTACTGTATTATTCCAGA
GTACGATGCCTATTTGGACATGGTTGACGGAGCTTCATGCTGCTTAGACACTGCCAGTTTTTGCCCT
GCAAAGCTGCGCAGCTTTCCAAAGAAACACTCCTATTTGGAACCCACAATACGATCGGCAGTGCCT
TCAGCGATCCAGAACACGCTCCAGAACGTCCTGGCAGCTGCCACAAAAAGAAATTGCAATGTCACG
CAAATGAGAGAATTGCCCGTATTGGATTCGGCGGCCTTTAATGTGGAATGCTTCAAGAAATATGCG
TGTAATAATGAATATTGGGAAACGTTTAAAGAAAACCCCATCAGGCTTACTGAAGAAAACGTGGTA
AATTACATTACCAAATTAAAAGGACCAAAAGCTGCTGCTCTTTTTGCGAAGACACATAATTTGAAT
ATGTTGCAGGACATACCAATGGACAGGTTTGTAATGGACTTAAAGAGAGACGTGAAAGTGACTCCA
GGAACAAAACATACTGAAGAACGGCCCAAGGTACAGGTGATCCAGGCTGCCGATCCGCTAGCAAC
AGCGTATCTGTGCGGAATCCACCGAGAGCTGGTTAGGAGATTAAATGCGGTCCTGCTTCCGAACAT
TCATACACTGTTTGATATGTCGGCTGAAGACTTTGACGCTATTATAGCCGAGCACTTCCAGCCTGGG
GATTGTGTTCTGGAAACTGACATCGCGTCGTTTGATAAAAGTGAGGACGACGCCATGGCTCTGACC
GCGTTAATGATTCTGGAAGACTTAGGTGTGGACGCAGAGCTGTTGACGCTGATTGAGGCGGCTTTC
GGCGAAATTTCATCAATACATTTGCCCACTAAAACTAAATTTAAATTCGGAGCCATGATGAAATCT
GGAATGTTCCTCACACTGTTTGTGAACACAGTCATTAACATTGTAATCGCAAGCAGAGTGTTGAGA
GAACGGCTAACCGGATCACCATGTGCAGCATTCATTGGAGATGACAATATCGTGAAAGGAGTCAA
ATCGGACAAATTAATGGCAGACAGGTGCGCCACCTGGTTGAATATGGAAGTCAAGATTATAGATGC
TGTGGTGGGCGAGAAAGCGCCTTATTTCTGTGGAGGGTTTATTTTGTGTGACTCCGTGACCGGCACA
GCGTGCCGTGTGGCAGACCCCCTAAAAAGGCTGTTTAAGCTTGGCAAACCTCTGGCAGCAGACGAT
GAACATGATGATGACAGGAGAAGGGCATTGCATGAAGAGTCAACACGCTGGAACCGAGTGGGTAT
TCTTTCAGAGCTGTGCAAGGCAGTAGAATCAAGGTATGAAACCGTAGGAACTTCCATCATAGTTAT
GGCCATGACTACTCTAGCTAGCAGTGTTAAATCATTCAGCTACCTGAGAGGGGCCCCTATAACTCTC
TACGGCTAACCTGAATGGACTACGACGTATCACGCCCAAACATTTACAGCCGCGGTGTCAAAAACC
GCGTGGACGTGGTTAACATCCCTGCTGGGAGGATCAGCCGTAATTATTATAATTGGCTTGGTGCTG
GCTACTATTGTGGCCATGTACGTGCTGACCAACCAGAAACATAATTGAATACAGCAGCAATTGGCA
AGCTGCTTACATAGAACTCGCGGCGATTGGCATGCCGCCTTAAAATTTTTATTTTATTTTTCTTTTCT
TTTCCGAATCGGATTTTGTTTTTAATATTTCAAAAAAAAAAAAAAAAAAAAAAAAAAAAAAAAAA
AAAAAAAAAAAAAAAAAAAAAAAAAAAAAAAAAAAAAAAAAAAAAA
VEE-UbAAY (SEQ ID NO: 14); VEE delivery vector with MHC class I mouse tumor epitopes
SIINFEKL (SEQ ID NO: 29362) and AH1-A5 inserted
VEE-Luciferase (SEQ ID NO: 15); VEE delivery vector with luciferase gene inserted at 7545
ubiquitin (SEQ ID NO: 38) > UbG76 0-228
Ubiquitin A76 (SEQ ID NO: 39) > UbA76 0-228
HLA-A2 (MHC class I) signal peptide (SEQ ID NO: 40) > MHC SignalPep 0-78
HLA-A2 (MHC class I) Trans Membrane domain (SEQ ID NO: 41) > HLA A2 TM Domain 0-201
IgK Leader Seq (SEQ ID NO: 42) > IgK Leader Seq 0-60
Human DC-Lamp (SEQ ID NO: 43) > HumanDCLAMP 0-3178
Mouse LAMP1 (SEQ ID NO: 44) > MouseLamp1 0-1858
Human Lamp1 cDNA (SEQ ID NO: 45) > Human Lamp1 0-2339
Tetanus toxoid nulceic acid sequence (SEQ ID NO: 46)
Tetanus toxoid amino acid sequence (SEQ ID NO: 47)
PADRE nulceotide sequence (SEQ ID NO: 48)
PADRE amino acid sequence (SEQ ID NO: 49)
WPRE (SEQ ID NO: 50) > WPRE 0-593
IRES (SEQ ID NO: 51) > eGFP_IRES_SEAP_Insert 1746-2335
GFP (SEQ ID NO: 52)
SEAP (SEQ ID NO: 53)
Firefly Luciferase (SEQ ID NO: 54)
FMDV 2A (SEQ ID NO: 55)
Ipilimumab Heavy Chain (SEQ ID NO: 29520)
QVQLVESGGGVVQPGRSLRLSCAASGFTFSSYTMHWVRQAPGKGLEWVTFISYDGNNKYYA
DSVKGRFTISRDNSKNTLYLQMNSLRAEDTAIYYCARTGWLGPFDYWGQGTLVTVSSASTKG
PSVFPLAPSSKSTSGGTAALGCLVKDYFPEPVTVSWNSGALTSGVHTFPAVLQSSGLYSLSSVV
TVPSSSLGTQTYICNVNHKPSNTKVDKRVEPKSCDKTHTCPPCPAPELLGGPSVFLFPPKPKDT
LMISRTPEVTCVVVDVSHEDPEVKFNWYVDGVEVHNAKTKPREEQYNSTYRVVSVLTVLHQ
DWLNGKEYKCKVSNKALPAPIEKTISKAKGQPREPQVYTLPPSRDELTKNQVSLTCLVKGFYP
SDIAVEWESNGQPENNYKTTPPVLDSDGSFFLYSKLTVDKSRWQQGNVFSCSVMHEALHNH
YTQKSLSLSPGK
Ipilimumab Light Chain (SEQ ID NO: 29521)
EIVLTQSPGTLSLSPGERATLSCRASQSVGSSYLAWYQQKPGQAPRLLIYGAFSRATGIPDRES
GSGSGTDFTLTISRLEPEDFAVYYCQQYGSSPWTFGQGTKVEIKRTVAAPSVFIFPPSDEQLKS
GTASVVCLLNNFYPREAKVQWKVDNALQSGNSQESVTEQDSKDSTYSLSSTLTLSKADYEKH
KVYACEVTHQGLSSPVTKSFNRGEC
Nivolumab Heavy Chain (SEQ ID NO: 29522)
QVQLVESGGGVVQPGRSLRLDCKASGITFSNSGMHWVRQAPGKGLEWVAVIWYDGSKRYY
ADSVKGRFTISRDNSKNTLFLQMNSLRAEDTAVYYCATNDDYWGQGTLVTVSSASTKGPSVF
PLAPCSRSTSESTAALGCLVKDYFPEPVTVSWNSGALTSGVHTFPAVLQSSGLYSLSSVVTVPS
SSLGTKTYTCNVDHKPSNTKVDKRVESKYGPPCPPCPAPEFLGGPSVFLFPPKPKDTLMISRTP
EVTCVVVDVSQEDPEVQFNWYVDGVEVHNAKTKPREEQFNSTYRVVSVLTVLHQDWLNGK
EYKCKVSNKGLPSSIEKTISKAKGQPREPQVYTLPPSQEEMTKNQVSLTCLVKGFYPSDIAVE
WESNGQPENNYKTTPPVLDSDGSFFLYSRLTVDKSRWQEGNVFSCSVMHEALHNHYTQKSLS
LSLGK
Nivolumab Light Chain (SEQ ID NO: 29523)
EIVLTQSPATLSLSPGERATLSCRASQSVSSYLAWYQQKPGQAPRLLIYDASNRATGIPARFSG
SGSGTDFTLTISSLEPEDFAVYYCQQSSNWPRTFGQGTKVEIKRTVAAPSVFIFPPSDEQLKSGT
ASVVCLLNNFYPREAKVQWKVDNALQSGNSQESVTEQDSKDSTYSLSSTLTLSKADYEKHK
VYACEVTHQGLSSPVTKSFNRGEC
ChAdV68-Empty-E4deleted (SEQ ID NO: 29365)
CATCTTCAATAATATACCTCAAACTTTTTGTGCGCGTTAATATGCAAATGAGGCGTTTGAATTTGGGGAGGAAG
GGCGGTGATTGGTCGAGGGATGAGCGACCGTTAGGGGCGGGGCGAGTGACGTTTTGATGACGTGGTTGCGAGG
AGGAGCCAGTTTGCAAGTTCTCGTGGGAAAAGTGACGTCAAACGAGGTGTGGTTTGAACACGGAAATACTCAA
TTTTCCCGCGCTCTCTGACAGGAAATGAGGTGTTTCTGGGCGGATGCAAGTGAAAACGGGCCATTTTCGCGCGA
AAACTGAATGAGGAAGTGAAAATCTGAGTAATTTCGCGTTTATGGCAGGGAGGAGTATTTGCCGAGGGCCGAG
TAGACTTTGACCGATTACGTGGGGGTTTCGATTACCGTGTTTTTCACCTAAATTTCCGCGTACGGTGTCAAAGTC
CGGTGTTTTTACGTAGGTGTCAGCTGATCGCCAGGGTATTTAAACCTGCGCTCTCCAGTCAAGAGGCCACTCTT
GAGTGCCAGCGAGAAGAGTTTTCTCCTCCGCGCCGCGAGTCAGATCTACACTTTGAAAGTAGGGataaGGTAGCG
AGTGAGTAGTGTTCTGGGGCGGGGGAGGACCTGCATGAGGGCCAGAATAACTGAAATCTGTGCTTTTCTGTGT
GTTGCAGCAGCATGAGCGGAAGCGGCTCCTTTGAGGGAGGGGTATTCAGCCCTTATCTGACGGGGCGTCTCCC
CTCCTGGGCGGGAGTGCGTCAGAATGTGATGGGATCCACGGTGGACGGCCGGCCCGTGCAGCCCGCGAACTCT
TCAACCCTGACCTATGCAACCCTGAGCTCTTCGTCGTTGGACGCAGCTGCCGCCGCAGCTGCTGCATCTGCCGC
CAGCGCCGTGCGCGGAATGGCCATGGGCGCCGGCTACTACGGCACTCTGGTGGCCAACTCGAGTTCCACCAAT
AATCCCGCCAGCCTGAACGAGGAGAAGCTGTTGCTGCTGATGGCCCAGCTCGAGGCCTTGACCCAGCGCCTGG
GCGAGCTGACCCAGCAGGTGGCTCAGCTGCAGGAGCAGACGCGGGCCGCGGTTGCCACGGTGAAATCCAAAT
AAAAAATGAATCAATAAATAAACGGAGACGGTTGTTGATTTTAACACAGAGTCTGAATCTTTATTTGATTTTTC
GCGCGCGGTAGGCCCTGGACCACCGGTCTCGATCATTGAGCACCCGGTGGATCTTTTCCAGGACCCGGTAGAG
GTGGGCTTGGATGTTGAGGTACATGGGCATGAGCCCGTCCCGGGGGTGGAGGTAGCTCCATTGCAGGGCCTCG
TGCTCGGGGGTGGTGTTGTAAATCACCCAGTCATAGCAGGGGCGCAGGGCATGGTGTTGCACAATATCTTTGA
GGAGGAGACTGATGGCCACGGGCAGCCCTTTGGTGTAGGTGTTTACAAATCTGTTGAGCTGGGAGGGATGCAT
GCGGGGGGAGATGAGGTGCATCTTGGCCTGGATCTTGAGATTGGCGATGTTACCGCCCAGATCCCGCCTGGGG
TTCATGTTGTGCAGGACCACCAGCACGGTGTATCCGGTGCACTTGGGGAATTTATCATGCAACTTGGAAGGGAA
GGCGTGAAAGAATTTGGCGACGCCTTTGTGCCCGCCCAGGTTTTCCATGCACTCATCCATGATGATGGCGATGG
GCCCGTGGGCGGCGGCCTGGGCAAAGACGTTTCGGGGGTCGGACACATCATAGTTGTGGTCCTGGGTGAGGTC
ATCATAGGCCATTTTAATGAATTTGGGGCGGAGGGTGCCGGACTGGGGGACAAAGGTACCCTCGATCCCGGGG
GCGTAGTTCCCCTCACAGATCTGCATCTCCCAGGCTTTGAGCTCGGAGGGGGGGATCATGTCCACCTGCGGGGC
GATAAAGAACACGGTTTCCGGGGCGGGGGAGATGAGCTGGGCCGAAAGCAAGTTCCGGAGCAGCTGGGACTT
GCCGCAGCCGGTGGGGCCGTAGATGACCCCGATGACCGGCTGCAGGTGGTAGTTGAGGGAGAGACAGCTGCC
GTCCTCCCGGAGGAGGGGGGCCACCTCGTTCATCATCTCGCGCACGTGCATGTTCTCGCGCACCAGTTCCGCCA
GGAGGCGCTCTCCCCCCAGGGATAGGAGCTCCTGGAGCGAGGCGAAGTTTTTCAGCGGCTTGAGTCCGTCGGC
CATGGGCATTTTGGAGAGGGTTTGTTGCAAGAGTTCCAGGCGGTCCCAGAGCTCGGTGATGTGCTCTACGGCAT
CTCGATCCAGCAGACCTCCTCGTTTCGCGGGTTGGGACGGCTGCGGGAGTAGGGCACCAGACGATGGGCGTCC
AGCGCAGCCAGGGTCCGGTCCTTCCAGGGTCGCAGCGTCCGCGTCAGGGTGGTCTCCGTCACGGTGAAGGGGT
GCGCGCCGGGCTGGGCGCTTGCGAGGGTGCGCTTCAGGCTCATCCGGCTGGTCGAAAACCGCTCCCGATCGGC
GCCCTGCGCGTCGGCCAGGTAGCAATTGACCATGAGTTCGTAGTTGAGCGCCTCGGCCGCGTGGCCTTTGGCGC
GGAGCTTACCTTTGGAAGTCTGCCCGCAGGCGGGACAGAGGAGGGACTTGAGGGCGTAGAGCTTGGGGGCGA
GGAAGACGGACTCGGGGGCGTAGGCGTCCGCGCCGCAGTGGGCGCAGACGGTCTCGCACTCCACGAGCCAGG
TGAGGTCGGGCTGGTCGGGGTCAAAAACCAGTTTCCCGCCGTTCTTTTTGATGCGTTTCTTACCTTTGGTCTCCA
TGAGCTCGTGTCCCCGCTGGGTGACAAAGAGGCTGTCCGTGTCCCCGTAGACCGACTTTATGGGCCGGTCCTCG
AGCGGTGTGCCGCGGTCCTCCTCGTAGAGGAACCCCGCCCACTCCGAGACGAAAGCCCGGGTCCAGGCCAGCA
CGAAGGAGGCCACGTGGGACGGGTAGCGGTCGTTGTCCACCAGCGGGTCCACCTTTTCCAGGGTATGCAAACA
CATGTCCCCCTCGTCCACATCCAGGAAGGTGATTGGCTTGTAAGTGTAGGCCACGTGACCGGGGGTCCCGGCCG
GGGGGGTATAAAAGGGTGCGGGTCCCTGCTCGTCCTCACTGTCTTCCGGATCGCTGTCCAGGAGCGCCAGCTGT
TGGGGTAGGTATTCCCTCTCGAAGGCGGGCATGACCTCGGCACTCAGGTTGTCAGTTTCTAGAAACGAGGAGG
ATTTGATATTGACGGTGCCGGCGGAGATGCCTTTCAAGAGCCCCTCGTCCATCTGGTCAGAAAAGACGATCTTT
TTGTTGTCGAGCTTGGTGGCGAAGGAGCCGTAGAGGGCGTTGGAGAGGAGCTTGGCGATGGAGCGCATGGTCT
GGTTTTTTTCCTTGTCGGCGCGCTCCTTGGCGGCGATGTTGAGCTGCACGTACTCGCGCGCCACGCACTTCCATT
CGGGGAAGACGGTGGTCAGCTCGTCGGGCACGATTCTGACCTGCCAGCCCCGATTATGCAGGGTGATGAGGTC
CACACTGGTGGCCACCTCGCCGCGCAGGGGCTCATTAGTCCAGCAGAGGCGTCCGCCCTTGCGCGAGCAGAAG
GGGGGCAGGGGGTCCAGCATGACCTCGTCGGGGGGGTCGGCATCGATGGTGAAGATGCCGGGCAGGAGGTCG
GGGTCAAAGTAGCTGATGGAAGTGGCCAGATCGTCCAGGGCAGCTTGCCATTCGCGCACGGCCAGCGCGCGCT
CGTAGGGACTGAGGGGCGTGCCCCAGGGCATGGGATGGGTAAGCGCGGAGGCGTACATGCCGCAGATGTCGT
AGACGTAGAGGGGCTCCTCGAGGATGCCGATGTAGGTGGGGTAGCAGCGCCCCCCGCGGATGCTGGCGCGCAC
GTAGTCATACAGCTCGTGCGAGGGGGCGAGGAGCCCCGGGCCCAGGTTGGTGCGACTGGGCTTTTCGGCGCGG
TAGACGATCTGGCGGAAAATGGCATGCGAGTTGGAGGAGATGGTGGGCCTTTGGAAGATGTTGAAGTGGGCGT
GGGGCAGTCCGACCGAGTCGCGGATGAAGTGGGCGTAGGAGTCTTGCAGCTTGGCGACGAGCTCGGCGGTGAC
TAGGACGTCCAGAGCGCAGTAGTCGAGGGTCTCCTGGATGATGTCATACTTGAGCTGTCCCTTTTGTTTCCACA
GCTCGCGGTTGAGAAGGAACTCTTCGCGGTCCTTCCAGTACTCTTCGAGGGGGAACCCGTCCTGATCTGCACGG
TAAGAGCCTAGCATGTAGAACTGGTTGACGGCCTTGTAGGCGCAGCAGCCCTTCTCCACGGGGAGGGCGTAGG
CCTGGGCGGCCTTGCGCAGGGAGGTGTGCGTGAGGGCGAAAGTGTCCCTGACCATGACCTTGAGGAACTGGTG
CTTGAAGTCGATATCGTCGCAGCCCCCCTGCTCCCAGAGCTGGAAGTCCGTGCGCTTCTTGTAGGCGGGGTTGG
GCAAAGCGAAAGTAACATCGTTGAAGAGGATCTTGCCCGCGCGGGGCATAAAGTTGCGAGTGATGCGGAAAG
GTTGGGGCACCTCGGCCCGGTTGTTGATGACCTGGGCGGCGAGCACGATCTCGTCGAAGCCGTTGATGTTGTGG
CCCACGATGTAGAGTTCCACGAATCGCGGACGGCCCTTGACGTGGGGCAGTTTCTTGAGCTCCTCGTAGGTGAG
CTCGTCGGGGTCGCTGAGCCCGTGCTGCTCGAGCGCCCAGTCGGCGAGATGGGGGTTGGCGCGGAGGAAGGAA
GTCCAGAGATCCACGGCCAGGGCGGTTTGCAGACGGTCCCGGTACTGACGGAACTGCTGCCCGACGGCCATTT
TTTCGGGGGTGACGCAGTAGAAGGTGCGGGGGTCCCCGTGCCAGCGATCCCATTTGAGCTGGAGGGCGAGATC
GAGGGCGAGCTCGACGAGCCGGTCGTCCCCGGAGAGTTTCATGACCAGCATGAAGGGGACGAGCTGCTTGCCG
AAGGACCCCATCCAGGTGTAGGTTTCCACATCGTAGGTGAGGAAGAGCCTTTCGGTGCGAGGATGCGAGCCGA
TGGGGAAGAACTGGATCTCCTGCCACCAATTGGAGGAATGGCTGTTGATGTGATGGAAGTAGAAATGCCGACG
GCGCGCCGAACACTCGTGCTTGTGTTTATACAAGCGGCCACAGTGCTCGCAACGCTGCACGGGATGCACGTGCT
GCACGAGCTGTACCTGAGTTCCTTTGACGAGGAATTTCAGTGGGAAGTGGAGTCGTGGCGCCTGCATCTCGTGC
TGTACTACGTCGTGGTGGTCGGCCTGGCCCTCTTCTGCCTCGATGGTGGTCATGCTGACGAGCCCGCGCGGGAG
GCAGGTCCAGACCTCGGCGCGAGCGGGTCGGAGAGCGAGGACGAGGGCGCGCAGGCCGGAGCTGTCCAGGGT
CCTGAGACGCTGCGGAGTCAGGTCAGTGGGCAGCGGCGGCGCGCGGTTGACTTGCAGGAGTTTTTCCAGGGCG
CGCGGGAGGTCCAGATGGTACTTGATCTCCACCGCGCCATTGGTGGCGACGTCGATGGCTTGCAGGGTCCCGTG
CCCCTGGGGTGTGACCACCGTCCCCCGTTTCTTCTTGGGCGGCTGGGGCGACGGGGGCGGTGCCTCTTCCATGG
TTAGAAGCGGCGGCGAGGACGCGCGCCGGGCGGCAGGGGCGGCTCGGGGCCCGGAGGCAGGGGCGGCAGGG
GCACGTCGGCGCCGCGCGCGGGTAGGTTCTGGTACTGCGCCCGGAGAAGACTGGCGTGAGCGACGACGCGACG
GTTGACGTCCTGGATCTGACGCCTCTGGGTGAAGGCCACGGGACCCGTGAGTTTGAACCTGAAAGAGAGTTCG
ACAGAATCAATCTCGGTATCGTTGACGGCGGCCTGCCGCAGGATCTCTTGCACGTCGCCCGAGTTGTCCTGGTA
GGCGATCTCGGTCATGAACTGCTCGATCTCCTCCTCTTGAAGGTCTCCGCGGCCGGCGCGCTCCACGGTGGCCG
CGAGGTCGTTGGAGATGCGGCCCATGAGCTGCGAGAAGGCGTTCATGCCCGCCTCGTTCCAGACGCGGCTGTA
GACCACGACGCCCTCGGGATCGCgGGCGCGCATGACCACCTGGGCGAGGTTGAGCTCCACGTGGCGCGTGAAG
ACCGCGTAGTTGCAGAGGCGCTGGTAGAGGTAGTTGAGCGTGGTGGCGATGTGCTCGGTGACGAAGAAATACA
TGATCCAGCGGCGGAGCGGCATCTCGCTGACGTCGCCCAGCGCCTCCAAACGTTCCATGGCCTCGTAAAAGTCC
ACGGCGAAGTTGAAAAACTGGGAGTTGCGCGCCGAGACGGTCAACTCCTCCTCCAGAAGACGGATGAGCTCGG
CGATGGTGGCGCGCACCTCGCGCTCGAAGGCCCCCGGGAGTTCCTCCACTTCCTCTTCTTCCTCCTCCACTAACA
TCTCTTCTACTTCCTCCTCAGGCGGCAGTGGTGGCGGGGGAGGGGGCCTGCGTCGCCGGCGGCGCACGGGCAG
ACGGTCGATGAAGCGCTCGATGGTCTCGCCGCGCCGGCGTCGCATGGTCTCGGTGACGGCGCGCCCGTCCTCGC
GGGGCCGCAGCGTGAAGACGCCGCCGCGCATCTCCAGGTGGCCGGGGGGGTCCCCGTTGGGCAGGGAGAGGG
CGCTGACGATGCATCTTATCAATTGCCCCGTAGGGACTCCGCGCAAGGACCTGAGCGTCTCGAGATCCACGGG
ATCTGAAAACCGCTGAACGAAGGCTTCGAGCCAGTCGCAGTCGCAAGGTAGGCTGAGCACGGTTTCTTCTGGC
GGGTCATGTTGGTTGGGAGCGGGGGGGGCGATGCTGCTGGTGATGAAGTTGAAATAGGCGGTTCTGAGACGGC
GGATGGTGGCGAGGAGCACCAGGTCTTTGGGCCCGGCTTGCTGGATGCGCAGACGGTCGGCCATGCCCCAGGC
GTGGTCCTGACACCTGGCCAGGTCCTTGTAGTAGTCCTGCATGAGCCGCTCCACGGGCACCTCCTCCTCGCCCG
CGCGGCCGTGCATGCGCGTGAGCCCGAAGCCGCGCTGGGGCTGGACGAGCGCCAGGTCGGCGACGACGCGCTC
GGCGAGGATGGCTTGCTGGATCTGGGTGAGGGTGGTCTGGAAGTCATCAAAGTCGACGAAGCGGTGGTAGGCT
CCGGTGTTGATGGTGTAGGAGCAGTTGGCCATGACGGACCAGTTGACGGTCTGGTGGCCCGGACGCACGAGCT
CGTGGTACTTGAGGCGCGAGTAGGCGCGCGTGTCGAAGATGTAGTCGTTGCAGGTGCGCACCAGGTACTGGTA
GCCGATGAGGAAGTGCGGCGGCGGCTGGCGGTAGAGCGGCCATCGCTCGGTGGCGGGGGCGCCGGGCGCGAG
GTCCTCGAGCATGGTGCGGTGGTAGCCGTAGATGTACCTGGACATCCAGGTGATGCCGGCGGCGGTGGTGGAG
GCGCGCGGGAACTCGCGGACGCGGTTCCAGATGTTGCGCAGCGGCAGGAAGTAGTTCATGGTGGGCACGGTCT
GGCCCGTGAGGCGCGCGCAGTCGTGGATGCTCTATACGGGCAAAAACGAAAGCGGTCAGCGGCTCGACTCCGT
GGCCTGGAGGCTAAGCGAACGGGTTGGGCTGCGCGTGTACCCCGGTTCGAATCTCGAATCAGGCTGGAGCCGC
AGCTAACGTGGTATTGGCACTCCCGTCTCGACCCAAGCCTGCACCAACCCTCCAGGATACGGAGGCGGGTCGTT
TTGCAACTTTTTTTTGGAGGCCGGATGAGACTAGTAAGCGCGGAAAGCGGCCGACCGCGATGGCTCGCTGCCG
TAGTCTGGAGAAGAATCGCCAGGGTTGCGTTGCGGTGTGCCCCGGTTCGAGGCCGGCCGGATTCCGCGGCTAA
CGAGGGCGTGGCTGCCCCGTCGTTTCCAAGACCCCATAGCCAGCCGACTTCTCCAGTTACGGAGCGAGCCCCTC
TTTTGTTTTGTTTGTTTTTGCCAGATGCATCCCGTACTGCGGCAGATGCGCCCCCACCACCCTCCACCGCAACAA
CAGCCCCCTCCACAGCCGGCGCTTCTGCCCCCGCCCCAGCAGCAACTTCCAGCCACGACCGCCGCGGCCGCCGT
GAGCGGGGCTGGACAGAGTTATGATCACCAGCTGGCCTTGGAAGAGGGCGAGGGGCTGGCGCGCCTGGGGGC
GTCGTCGCCGGAGCGGCACCCGCGCGTGCAGATGAAAAGGGACGCTCGCGAGGCCTACGTGCCCAAGCAGAA
CCTGTTCAGAGACAGGAGCGGCGAGGAGCCCGAGGAGATGCGCGCGGCCCGGTTCCACGCGGGGGGGGAGCT
GCGGCGCGGCCTGGACCGAAAGAGGGTGCTGAGGGACGAGGATTTCGAGGCGGACGAGCTGACGGGGATCAG
CCCCGCGCGCGCGCACGTGGCCGCGGCCAACCTGGTCACGGCGTACGAGCAGACCGTGAAGGAGGAGAGCAA
CTTCCAAAAATCCTTCAACAACCACGTGCGCACCCTGATCGCGCGCGAGGAGGTGACCCTGGGCCTGATGCAC
CTGTGGGACCTGCTGGAGGCCATCGTGCAGAACCCCACCAGCAAGCCGCTGACGGCGCAGCTGTTCCTGGTGG
TGCAGCATAGTCGGGACAACGAAGCGTTCAGGGAGGCGCTGCTGAATATCACCGAGCCCGAGGGCCGCTGGCT
CCTGGACCTGGTGAACATTCTGCAGAGCATCGTGGTGCAGGAGCGCGGGCTGCCGCTGTCCGAGAAGCTGGCG
GCCATCAACTTCTCGGTGCTGAGTTTGGGCAAGTACTACGCTAGGAAGATCTACAAGACCCCGTACGTGCCCAT
AGACAAGGAGGTGAAGATCGACGGGTTTTACATGCGCATGACCCTGAAAGTGCTGACCCTGAGCGACGATCTG
GGGGTGTACCGCAACGACAGGATGCACCGTGCGGTGAGCGCCAGCAGGCGGCGCGAGCTGAGCGACCAGGAG
CTGATGCATAGTCTGCAGCGGGCCCTGACCGGGGCCGGGACCGAGGGGGAGAGCTACTTTGACATGGGCGCGG
ACCTGCACTGGCAGCCCAGCCGCCGGGCCTTGGAGGCGGCGGCAGGACCCTACGTAGAAGAGGTGGACGATG
AGGTGGACGAGGAGGGCGAGTACCTGGAAGACTGATGGCGCGACCGTATTTTTGCTAGATGCAACAACAACAG
CCACCTCCTGATCCCGCGATGCGGGCGGCGCTGCAGAGCCAGCCGTCCGGCATTAACTCCTCGGACGATTGGA
CCCAGGCCATGCAACGCATCATGGCGCTGACGACCCGCAACCCCGAAGCCTTTAGACAGCAGCCCCAGGCCAA
CCGGCTCTCGGCCATCCTGGAGGCCGTGGTGCCCTCGCGCTCCAACCCCACGCACGAGAAGGTCCTGGCCATCG
TGAACGCGCTGGTGGAGAACAAGGCCATCCGCGGCGACGAGGCCGGCCTGGTGTACAACGCGCTGCTGGAGC
GCGTGGCCCGCTACAACAGCACCAACGTGCAGACCAACCTGGACCGCATGGTGACCGACGTGCGCGAGGCCGT
GGCCCAGCGCGAGCGGTTCCACCGCGAGTCCAACCTGGGATCCATGGTGGCGCTGAACGCCTTCCTCAGCACC
CAGCCCGCCAACGTGCCCCGGGGCCAGGAGGACTACACCAACTTCATCAGCGCCCTGCGCCTGATGGTGACCG
AGGTGCCCCAGAGCGAGGTGTACCAGTCCGGGCCGGACTACTTCTTCCAGACCAGTCGCCAGGGCTTGCAGAC
CGTGAACCTGAGCCAGGCTTTCAAGAACTTGCAGGGCCTGTGGGGCGTGCAGGCCCCGGTCGGGGACCGCGCG
ACGGTGTCGAGCCTGCTGACGCCGAACTCGCGCCTGCTGCTGCTGCTGGTGGCCCCCTTCACGGACAGCGGCAG
CATCAACCGCAACTCGTACCTGGGCTACCTGATTAACCTGTACCGCGAGGCCATCGGCCAGGCGCACGTGGAC
GAGCAGACCTACCAGGAGATCACCCACGTGAGCCGCGCCCTGGGCCAGGACGACCCGGGCAACCTGGAAGCC
ACCCTGAACTTTTTGCTGACCAACCGGTCGCAGAAGATCCCGCCCCAGTACGCGCTCAGCACCGAGGAGGAGC
GCATCCTGCGTTACGTGCAGCAGAGCGTGGGCCTGTTCCTGATGCAGGAGGGGGCCACCCCCAGCGCCGCGCT
CGACATGACCGCGCGCAACATGGAGCCCAGCATGTACGCCAGCAACCGCCCGTTCATCAATAAACTGATGGAC
TACTTGCATCGGGCGGCCGCCATGAACTCTGACTATTTCACCAACGCCATCCTGAATCCCCACTGGCTCCCGCC
GCCGGGGTTCTACACGGGCGAGTACGACATGCCCGACCCCAATGACGGGTTCCTGTGGGACGATGTGGACAGC
AGCGTGTTCTCCCCCCGACCGGGTGCTAACGAGCGCCCCTTGTGGAAGAAGGAAGGCAGCGACCGACGCCCGT
CCTCGGCGCTGTCCGGCCGCGAGGGTGCTGCCGCGGCGGTGCCCGAGGCCGCCAGTCCTTTCCCGAGCTTGCCC
TTCTCGCTGAACAGTATCCGCAGCAGCGAGCTGGGCAGGATCACGCGCCCGCGCTTGCTGGGCGAAGAGGAGT
ACTTGAATGACTCGCTGTTGAGACCCGAGCGGGAGAAGAACTTCCCCAATAACGGGATAGAAAGCCTGGTGGA
CAAGATGAGCCGCTGGAAGACGTATGCGCAGGAGCACAGGGACGATCCCCGGGCGTCGCAGGGGGCCACGAG
CCGGGGCAGCGCCGCCCGTAAACGCCGGTGGCACGACAGGCAGCGGGGACAGATGTGGGACGATGAGGACTC
CGCCGACGACAGCAGCGTGTTGGACTTGGGTGGGAGTGGTAACCCGTTCGCTCACCTGCGCCCCCGTATCGGG
CGCATGATGTAAGAGAAACCGAAAATAAATGATACTCACCAAGGCCATGGCGACCAGCGTGCGTTCGTTTCTT
CTCTGTTGTTGTTGTATCTAGTATGATGAGGCGTGCGTACCCGGAGGGTCCTCCTCCCTCGTACGAGAGCGTGA
TGCAGCAGGCGATGGCGGCGGCGGCGATGCAGCCCCCGCTGGAGGCTCCTTACGTGCCCCCGCGGTACCTGGC
GCCTACGGAGGGGCGGAACAGCATTCGTTACTCGGAGCTGGCACCCTTGTACGATACCACCCGGTTGTACCTG
GTGGACAACAAGTCGGCGGACATCGCCTCGCTGAACTACCAGAACGACCACAGCAACTTCCTGACCACCGTGG
TGCAGAACAATGACTTCACCCCCACGGAGGCCAGCACCCAGACCATCAACTTTGACGAGCGCTCGCGGTGGGG
CGGCCAGCTGAAAACCATCATGCACACCAACATGCCCAACGTGAACGAGTTCATGTACAGCAACAAGTTCAAG
GCGCGGGTGATGGTCTCCCGCAAGACCCCCAATGGGGTGACAGTGACAGAGGATTATGATGGTAGTCAGGATG
AGCTGAAGTATGAATGGGTGGAATTTGAGCTGCCCGAAGGCAACTTCTCGGTGACCATGACCATCGACCTGAT
GAACAACGCCATCATCGACAATTACTTGGCGGTGGGGCGGCAGAACGGGGTGCTGGAGAGCGACATCGGCGT
GAAGTTCGACACTAGGAACTTCAGGCTGGGCTGGGACCCCGTGACCGAGCTGGTCATGCCCGGGGTGTACACC
AACGAGGCTTTCCATCCCGATATTGTCTTGCTGCCCGGCTGCGGGGTGGACTTCACCGAGAGCCGCCTCAGCAA
CCTGCTGGGCATTCGCAAGAGGCAGCCCTTCCAGGAAGGCTTCCAGATCATGTACGAGGATCTGGAGGGGGGC
AACATCCCCGCGCTCCTGGATGTCGACGCCTATGAGAAAAGCAAGGAGGATGCAGCAGCTGAAGCAACTGCAG
CCGTAGCTACCGCCTCTACCGAGGTCAGGGGCGATAATTTTGCAAGCGCCGCAGCAGTGGCAGCGGCCGAGGC
GGCTGAAACCGAAAGTAAGATAGTCATTCAGCCGGTGGAGAAGGATAGCAAGAACAGGAGCTACAACGTACT
ACCGGACAAGATAAACACCGCCTACCGCAGCTGGTACCTAGCCTACAACTATGGCGACCCCGAGAAGGGCGTG
CGCTCCTGGACGCTGCTCACCACCTCGGACGTCACCTGCGGCGTGGAGCAAGTCTACTGGTCGCTGCCCGACAT
GATGCAAGACCCGGTCACCTTCCGCTCCACGCGTCAAGTTAGCAACTACCCGGTGGTGGGCGCCGAGCTCCTGC
CCGTCTACTCCAAGAGCTTCTTCAACGAGCAGGCCGTCTACTCGCAGCAGCTGCGCGCCTTCACCTCGCTTACG
CACGTCTTCAACCGCTTCCCCGAGAACCAGATCCTCGTCCGCCCGCCCGCGCCCACCATTACCACCGTCAGTGA
AAACGTTCCTGCTCTCACAGATCACGGGACCCTGCCGCTGCGCAGCAGTATCCGGGGAGTCCAGCGCGTGACC
GTTACTGACGCCAGACGCCGCACCTGCCCCTACGTCTACAAGGCCCTGGGCATAGTCGCGCCGCGCGTCCTCTC
GAGCCGCACCTTCTAAATGTCCATTCTCATCTCGCCCAGTAATAACACCGGTTGGGGCCTGCGCGCGCCCAGCA
AGATGTACGGAGGCGCTCGCCAACGCTCCACGCAACACCCCGTGCGCGTGCGCGGGCACTTCCGCGCTCCCTG
GGGCGCCCTCAAGGGCCGCGTGCGGTCGCGCACCACCGTCGACGACGTGATCGACCAGGTGGTGGCCGACGCG
CGCAACTACACCCCCGCCGCCGCGCCCGTCTCCACCGTGGACGCCGTCATCGACAGCGTGGTGGCcGACGCGCG
CCGGTACGCCCGCGCCAAGAGCCGGCGGCGGCGCATCGCCCGGCGGCACCGGAGCACCCCCGCCATGCGCGC
GGCGCGAGCCTTGCTGCGCAGGGCCAGGCGCACGGGACGCAGGGCCATGCTCAGGGCGGCCAGACGCGCGGC
TTCAGGCGCCAGCGCCGGCAGGACCCGGAGACGCGCGGCCACGGCGGCGGCAGCGGCCATCGCCAGCATGTC
CCGCCCGCGGCGAGGGAACGTGTACTGGGTGCGCGACGCCGCCACCGGTGTGCGCGTGCCCGTGCGCACCCGC
CCCCCTCGCACTTGAAGATGTTCACTTCGCGATGTTGATGTGTCCCAGCGGCGAGGAGGATGTCCAAGCGCAAA
TTCAAGGAAGAGATGCTCCAGGTCATCGCGCCTGAGATCTACGGCCCTGCGGTGGTGAAGGAGGAAAGAAAGC
CCCGCAAAATCAAGCGGGTCAAAAAGGACAAAAAGGAAGAAGAAAGTGATGTGGACGGATTGGTGGAGTTTG
TGCGCGAGTTCGCCCCCCGGCGGCGCGTGCAGTGGCGCGGGCGGAAGGTGCAACCGGTGCTGAGACCCGGCAC
CACCGTGGTCTTCACGCCCGGCGAGCGCTCCGGCACCGCTTCCAAGCGCTCCTACGACGAGGTGTACGGGGAT
GATGATATTCTGGAGCAGGCGGCCGAGCGCCTGGGCGAGTTTGCTTACGGCAAGCGCAGCCGTTCCGCACCGA
AGGAAGAGGCGGTGTCCATCCCGCTGGACCACGGCAACCCCACGCCGAGCCTCAAGCCCGTGACCTTGCAGCA
GGTGCTGCCGACCGCGGCGCCGCGCCGGGGGTTCAAGCGCGAGGGCGAGGATCTGTACCCCACCATGCAGCTG
ATGGTGCCCAAGCGCCAGAAGCTGGAAGACGTGCTGGAGACCATGAAGGTGGACCCGGACGTGCAGCCCGAG
GTCAAGGTGCGGCCCATCAAGCAGGTGGCCCCGGGCCTGGGCGTGCAGACCGTGGACATCAAGATTCCCACGG
AGCCCATGGAAACGCAGACCGAGCCCATGATCAAGCCCAGCACCAGCACCATGGAGGTGCAGACGGATCCCT
GGATGCCATCGGCTCCTAGTCGAAGACCCCGGCGCAAGTACGGCGCGGCCAGCCTGCTGATGCCCAACTACGC
GCTGCATCCTTCCATCATCCCCACGCCGGGCTACCGCGGCACGCGCTTCTACCGCGGTCATACCAGCAGCCGCC
GCCGCAAGACCACCACTCGCCGCCGCCGTCGCCGCACCGCCGCTGCAACCACCCCTGCCGCCCTGGTGCGGAG
AGTGTACCGCCGCGGCCGCGCACCTCTGACCCTGCCGCGCGCGCGCTACCACCCGAGCATCGCCATTTAAACTT
TCGCCtGCTTTGCAGATCAATGGCCCTCACATGCCGCCTTCGCGTTCCCATTACGGGCTACCGAGGAAGAAAAC
CGCGCCGTAGAAGGCTGGCGGGGAACGGGATGCGTCGCCACCACCACCGGCGGCGGCGCGCCATCAGCAAGC
GGTTGGGGGGAGGCTTCCTGCCCGCGCTGATCCCCATCATCGCCGCGGCGATCGGGGCGATCCCCGGCATTGCT
TCCGTGGCGGTGCAGGCCTCTCAGCGCCACTGAGACACACTTGGAAACATCTTGTAATAAACCaATGGACTCTG
ACGCTCCTGGTCCTGTGATGTGTTTTCGTAGACAGATGGAAGACATCAATTTTTCGTCCCTGGCTCCGCGACAC
GGCACGCGGCCGTTCATGGGCACCTGGAGCGACATCGGCACCAGCCAACTGAACGGGGGCGCCTTCAATTGGA
GCAGTCTCTGGAGCGGGCTTAAGAATTTCGGGTCCACGCTTAAAACCTATGGCAGCAAGGCGTGGAACAGCAC
CACAGGGCAGGCGCTGAGGGATAAGCTGAAAGAGCAGAACTTCCAGCAGAAGGTGGTCGATGGGCTCGCCTC
GGGCATCAACGGGGTGGTGGACCTGGCCAACCAGGCCGTGCAGCGGCAGATCAACAGCCGCCTGGACCCGGT
GCCGCCCGCCGGCTCCGTGGAGATGCCGCAGGTGGAGGAGGAGCTGCCTCCCCTGGACAAGCGGGGCGAGAA
GCGACCCCGCCCCGATGCGGAGGAGACGCTGCTGACGCACACGGACGAGCCGCCCCCGTACGAGGAGGCGGT
GAAACTGGGTCTGCCCACCACGCGGCCCATCGCGCCCCTGGCCACCGGGGTGCTGAAACCCGAAAAGCCCGCG
ACCCTGGACTTGCCTCCTCCCCAGCCTTCCCGCCCCTCTACAGTGGCTAAGCCCCTGCCGCCGGTGGCCGTGGC
CCGCGCGCGACCCGGGGGCACCGCCCGCCCTCATGCGAACTGGCAGAGCACTCTGAACAGCATCGTGGGTCTG
GGAGTGCAGAGTGTGAAGCGCCGCCGCTGCTATTAAACCTACCGTAGCGCTTAACTTGCTTGTCTGTGTGTGTA
TGTATTATGTCGCCGCCGCCGCTGTCCACCAGAAGGAGGAGTGAAGAGGCGCGTCGCCGAGTTGCAAGATGGC
CACCCCATCGATGCTGCCCCAGTGGGCGTACATGCACATCGCCGGACAGGACGCTTCGGAGTACCTGAGTCCG
GGTCTGGTGCAGTTTGCCCGCGCCACAGACACCTACTTCAGTCTGGGGAACAAGTTTAGGAACCCCACGGTGG
CGCCCACGCACGATGTGACCACCGACCGCAGCCAGCGGCTGACGCTGCGCTTCGTGCCCGTGGACCGCGAGGA
CAACACCTACTCGTACAAAGTGCGCTACACGCTGGCCGTGGGCGACAACCGCGTGCTGGACATGGCCAGCACC
TACTTTGACATCCGCGGCGTGCTGGATCGGGGCCCTAGCTTCAAACCCTACTCCGGCACCGCCTACAACAGTCT
GGCCCCCAAGGGAGCACCCAACACTTGTCAGTGGACATATAAAGCCGATGGTGAAACTGCCACAGAAAAAAC
CTATACATATGGAAATGCACCCGTGCAGGGCATTAACATCACAAAAGATGGTATTCAACTTGGAACTGACACC
GATGATCAGCCAATCTACGCAGATAAAACCTATCAGCCTGAACCTCAAGTGGGTGATGCTGAATGGCATGACA
TCACTGGTACTGATGAAAAGTATGGAGGCAGAGCTCTTAAGCCTGATACCAAAATGAAGCCTTGTTATGGTTCT
TTTGCCAAGCCTACTAATAAAGAAGGAGGTCAGGCAAATGTGAAAACAGGAACAGGCACTACTAAAGAATAT
GACATAGACATGGCTTTCTTTGACAACAGAAGTGCGGCTGCTGCTGGCCTAGCTCCAGAAATTGTTTTGTATAC
TGAAAATGTGGATTTGGAAACTCCAGATACCCATATTGTATACAAAGCAGGCACAGATGACAGCAGCTCTTCT
ATTAATTTGGGTCAGCAAGCCATGCCCAACAGACCTAACTACATTGGTTTCAGAGACAACTTTATCGGGCTCAT
GTACTACAACAGCACTGGCAATATGGGGGTGCTGGCCGGTCAGGCTTCTCAGCTGAATGCTGTGGTTGACTTGC
AAGACAGAAACACCGAGCTGTCCTACCAGCTCTTGCTTGACTCTCTGGGTGACAGAACCCGGTATTTCAGTATG
TGGAATCAGGCGGTGGACAGCTATGATCCTGATGTGCGCATTATTGAAAATCATGGTGTGGAGGATGAACTTC
CCAACTATTGTTTCCCTCTGGATGCTGTTGGCAGAACAGATACTTATCAGGGAATTAAGGCTAATGGAACTGAT
CAAACCACATGGACCAAAGATGACAGTGTCAATGATGCTAATGAGATAGGCAAGGGTAATCCATTCGCCATGG
AAATCAACATCCAAGCCAACCTGTGGAGGAACTTCCTCTACGCCAACGTGGCCCTGTACCTGCCCGACTCTTAC
AAGTACACGCCGGCCAATGTTACCCTGCCCACCAACACCAACACCTACGATTACATGAACGGCCGGGTGGTGG
CGCCCTCGCTGGTGGACTCCTACATCAACATCGGGGCGCGCTGGTCGCTGGATCCCATGGACAACGTGAACCCC
TTCAACCACCACCGCAATGCGGGGCTGCGCTACCGCTCCATGCTCCTGGGCAACGGGCGCTACGTGCCCTTCCA
CATCCAGGTGCCCCAGAAATTTTTCGCCATCAAGAGCCTCCTGCTCCTGCCCGGGTCCTACACCTACGAGTGGA
ACTTCCGCAAGGACGTCAACATGATCCTGCAGAGCTCCCTCGGCAACGACCTGCGCACGGACGGGGCCTCCAT
CTCCTTCACCAGCATCAACCTCTACGCCACCTTCTTCCCCATGGCGCACAACACGGCCTCCACGCTCGAGGCCA
TGCTGCGCAACGACACCAACGACCAGTCCTTCAACGACTACCTCTCGGCGGCCAACATGCTCTACCCCATCCCG
GCCAACGCCACCAACGTGCCCATCTCCATCCCCTCGCGCAACTGGGCCGCCTTCCGCGGCTGGTCCTTCACGCG
TCTCAAGACCAAGGAGACGCCCTCGCTGGGCTCCGGGTTCGACCCCTACTTCGTCTACTCGGGCTCCATCCCCT
ACCTCGACGGCACCTTCTACCTCAACCACACCTTCAAGAAGGTCTCCATCACCTTCGACTCCTCCGTCAGCTGG
CCCGGCAACGACCGGCTCCTGACGCCCAACGAGTTCGAAATCAAGCGCACCGTCGACGGCGAGGGCTACAACG
TGGCCCAGTGCAACATGACCAAGGACTGGTTCCTGGTCCAGATGCTGGCCCACTACAACATCGGCTACCAGGG
CTTCTACGTGCCCGAGGGCTACAAGGACCGCATGTACTCCTTCTTCCGCAACTTCCAGCCCATGAGCCGCCAGG
TGGTGGACGAGGTCAACTACAAGGACTACCAGGCCGTCACCCTGGCCTACCAGCACAACAACTCGGGCTTCGT
CGGCTACCTCGCGCCCACCATGCGCCAGGGCCAGCCCTACCCCGCCAACTACCCCTACCCGCTCATCGGCAAG
AGCGCCGTCACCAGCGTCACCCAGAAAAAGTTCCTCTGCGACAGGGTCATGTGGCGCATCCCCTTCTCCAGCAA
CTTCATGTCCATGGGCGCGCTCACCGACCTCGGCCAGAACATGCTCTATGCCAACTCCGCCCACGCGCTAGACA
TGAATTTCGAAGTCGACCCCATGGATGAGTCCACCCTTCTCTATGTTGTCTTCGAAGTCTTCGACGTCGTCCGAG
TGCACCAGCCCCACCGCGGCGTCATCGAGGCCGTCTACCTGCGCACCCCCTTCTCGGCCGGTAACGCCACCACC
TAAGCTCTTGCTTCTTGCAAGCCATGGCCGCGGGCTCCGGCGAGCAGGAGCTCAGGGCCATCATCCGCGACCTG
GGCTGCGGGCCCTACTTCCTGGGCACCTTCGATAAGCGCTTCCCGGGATTCATGGCCCCGCACAAGCTGGCCTG
CGCCATCGTCAACACGGCCGGCCGCGAGACCGGGGGCGAGCACTGGCTGGCCTTCGCCTGGAACCCGCGCTCG
AACACCTGCTACCTCTTCGACCCCTTCGGGTTCTCGGACGAGCGCCTCAAGCAGATCTACCAGTTCGAGTACGA
GGGCCTGCTGCGCCGCAGCGCCCTGGCCACCGAGGACCGCTGCGTCACCCTGGAAAAGTCCACCCAGACCGTG
CAGGGTCCGCGCTCGGCCGCCTGCGGGCTCTTCTGCTGCATGTTCCTGCACGCCTTCGTGCACTGGCCCGACCG
CCCCATGGACAAGAACCCCACCATGAACTTGCTGACGGGGGTGCCCAACGGCATGCTCCAGTCGCCCCAGGTG
GAACCCACCCTGCGCCGCAACCAGGAGGCGCTCTACCGCTTCCTCAACTCCCACTCCGCCTACTTTCGCTCCCA
CCGCGCGCGCATCGAGAAGGCCACCGCCTTCGACCGCATGAATCAAGACATGTAAACCGTGTGTGTATGTTAA
ATGTCTTTAATAAACAGCACTTTCATGTTACACATGCATCTGAGATGATTTATTTAGAAATCGAAAGGGTTCTG
CCGGGTCTCGGCATGGCCCGCGGGCAGGGACACGTTGCGGAACTGGTACTTGGCCAGCCACTTGAACTCGGGG
ATCAGCAGTTTGGGCAGCGGGGTGTCGGGGAAGGAGTCGGTCCACAGCTTCCGCGTCAGTTGCAGGGCGCCCA
GCAGGTCGGGCGCGGAGATCTTGAAATCGCAGTTGGGACCCGCGTTCTGCGCGCGGGAGTTGCGGTACACGGG
GTTGCAGCACTGGAACACCATCAGGGCCGGGTGCTTCACGCTCGCCAGCACCGTCGCGTCGGTGATGCTCTCCA
CGTCGAGGTCCTCGGCGTTGGCCATCCCGAAGGGGGTCATCTTGCAGGTCTGCCTTCCCATGGTGGGCACGCAC
CCGGGCTTGTGGTTGCAATCGCAGTGCAGGGGGATCAGCATCATCTGGGCCTGGTCGGCGTTCATCCCCGGGTA
CATGGCCTTCATGAAAGCCTCCAATTGCCTGAACGCCTGCTGGGCCTTGGCTCCCTCGGTGAAGAAGACCCCGC
AGGACTTGCTAGAGAACTGGTTGGTGGCGCACCCGGCGTCGTGCACGCAGCAGCGCGCGTCGTTGTTGGCCAG
CTGCACCACGCTGCGCCCCCAGCGGTTCTGGGTGATCTTGGCCCGGTCGGGGTTCTCCTTCAGCGCGCGCTGCC
CGTTCTCGCTCGCCACATCCATCTCGATCATGTGCTCCTTCTGGATCATGGTGGTCCCGTGCAGGCACCGCAGCT
TGCCCTCGGCCTCGGTGCACCCGTGCAGCCACAGCGCGCACCCGGTGCACTCCCAGTTCTTGTGGGCGATCTGG
GAATGCGCGTGCACGAAGCCCTGCAGGAAGCGGCCCATCATGGTGGTCAGGGTCTTGTTGCTAGTGAAGGTCA
GCGGAATGCCGCGGTGCTCCTCGTTGATGTACAGGTGGCAGATGCGGCGGTACACCTCGCCCTGCTCGGGCATC
AGCTGGAAGTTGGCTTTCAGGTCGGTCTCCACGCGGTAGCGGTCCATCAGCATAGTCATGATTTCCATACCCTT
CTCCCAGGCCGAGACGATGGGCAGGCTCATAGGGTTCTTCACCATCATCTTAGCGCTAGCAGCCGCGGCCAGG
GGGTCGCTCTCGTCCAGGGTCTCAAAGCTCCGCTTGCCGTCCTTCTCGGTGATCCGCACCGGGGGGTAGCTGAA
GCCCACGGCCGCCAGCTCCTCCTCGGCCTGTCTTTCGTCCTCGCTGTCCTGGCTGACGTCCTGCAGGACCACATG
CTTGGTCTTGCGGGGTTTCTTCTTGGGCGGCAGCGGCGGCGGAGATGTTGGAGATGGCGAGGGGGAGCGCGAG
TTCTCGCTCACCACTACTATCTCTTCCTCTTCTTGGTCCGAGGCCACGCGGCGGTAGGTATGTCTCTTCGGGGGC
AGAGGCGGAGGCGACGGGCTCTCGCCGCCGCGACTTGGCGGATGGCTGGCAGAGCCCCTTCCGCGTTCGGGGG
TGCGCTCCCGGCGGCGCTCTGACTGACTTCCTCCGCGGCCGGCCATTGTGTTCTCCTAGGGAGGAACAACAAGC
ATGGAGACTCAGCCATCGCCAACCTCGCCATCTGCCCCCACCGCCGACGAGAAGCAGCAGCAGCAGAATGAAA
GCTTAACCGCCCCGCCGCCCAGCCCCGCCACCTCCGACGCGGCCGTCCCAGACATGCAAGAGATGGAGGAATC
CATCGAGATTGACCTGGGCTATGTGACGCCCGCGGAGCACGAGGAGGAGCTGGCAGTGCGCTTTTCACAAGAA
GAGATACACCAAGAACAGCCAGAGCAGGAAGCAGAGAATGAGCAGAGTCAGGCTGGGCTCGAGCATGACGGC
GACTACCTCCACCTGAGCGGGGGGGAGGACGCGCTCATCAAGCATCTGGCCCGGCAGGCCACCATCGTCAAGG
ATGCGCTGCTCGACCGCACCGAGGTGCCCCTCAGCGTGGAGGAGCTCAGCCGCGCCTACGAGTTGAACCTCTTC
TCGCCGCGCGTGCCCCCCAAGCGCCAGCCCAATGGCACCTGCGAGCCCAACCCGCGCCTCAACTTCTACCCGGT
CTTCGCGGTGCCCGAGGCCCTGGCCACCTACCACATCTTTTTCAAGAACCAAAAGATCCCCGTCTCCTGCCGCG
CCAACCGCACCCGCGCCGACGCCCTTTTCAACCTGGGTCCCGGCGCCCGCCTACCTGATATCGCCTCCTTGGAA
GAGGTTCCCAAGATCTTCGAGGGTCTGGGCAGCGACGAGACTCGGGCCGCGAACGCTCTGCAAGGAGAAGGA
GGAGAGCATGAGCACCACAGCGCCCTGGTCGAGTTGGAAGGCGACAACGCGCGGCTGGCGGTGCTCAAACGC
ACGGTCGAGCTGACCCATTTCGCCTACCCGGCTCTGAACCTGCCCCCCAAAGTCATGAGCGCGGTCATGGACCA
GGTGCTCATCAAGCGCGCGTCGCCCATCTCCGAGGACGAGGGCATGCAAGACTCCGAGGAGGGCAAGCCCGTG
GTCAGCGACGAGCAGCTGGCCCGGTGGCTGGGTCCTAATGCTAGTCCCCAGAGTTTGGAAGAGCGGCGCAAAC
TCATGATGGCCGTGGTCCTGGTGACCGTGGAGCTGGAGTGCCTGCGCCGCTTCTTCGCCGACGCGGAGACCCTG
CGCAAGGTCGAGGAGAACCTGCACTACCTCTTCAGGCACGGGTTCGTGCGCCAGGCCTGCAAGATCTCCAACG
TGGAGCTGACCAACCTGGTCTCCTACATGGGCATCTTGCACGAGAACCGCCTGGGGCAGAACGTGCTGCACAC
CACCCTGCGCGGGGAGGCCCGGCGCGACTACATCCGCGACTGCGTCTACCTCTACCTCTGCCACACCTGGCAGA
CGGGCATGGGCGTGTGGCAGCAGTGTCTGGAGGAGCAGAACCTGAAAGAGCTCTGCAAGCTCCTGCAGAAGA
ACCTCAAGGGTCTGTGGACCGGGTTCGACGAGCGCACCACCGCCTCGGACCTGGCCGACCTCATTTTCCCCGAG
CGCCTCAGGCTGACGCTGCGCAACGGCCTGCCCGACTTTATGAGCCAAAGCATGTTGCAAAACTTTCGCTCTTT
CATCCTCGAACGCTCCGGAATCCTGCCCGCCACCTGCTCCGCGCTGCCCTCGGACTTCGTGCCGCTGACCTTCC
GCGAGTGCCCCCCGCCGCTGTGGAGCCACTGCTACCTGCTGCGCCTGGCCAACTACCTGGCCTACCACTCGGAC
GTGATCGAGGACGTCAGCGGCGAGGGCCTGCTCGAGTGCCACTGCCGCTGCAACCTCTGCACGCCGCACCGCT
CCCTGGCCTGCAACCCCCAGCTGCTGAGCGAGACCCAGATCATCGGCACCTTCGAGTTGCAAGGGCCCAGCGA
AGGCGAGGGTTCAGCCGCCAAGGGGGGTCTGAAACTCACCCCGGGGCTGTGGACCTCGGCCTACTTGCGCAAG
TTCGTGCCCGAGGACTACCATCCCTTCGAGATCAGGTTCTACGAGGACCAATCCCATCCGCCCAAGGCCGAGCT
GTCGGCCTGCGTCATCACCCAGGGGGCGATCCTGGCCCAATTGCAAGCCATCCAGAAATCCCGCCAAGAATTC
TTGCTGAAAAAGGGCCGCGGGGTCTACCTCGACCCCCAGACCGGTGAGGAGCTCAACCCCGGCTTCCCCCAGG
ATGCCCCGAGGAAACAAGAAGCTGAAAGTGGAGCTGCCGCCCGTGGAGGATTTGGAGGAAGACTGGGAGAAC
AGCAGTCAGGCAGAGGAGGAGGAGATGGAGGAAGACTGGGACAGCACTCAGGCAGAGGAGGACAGCCTGCA
AGACAGTCTGGAGGAAGACGAGGAGGAGGCAGAGGAGGAGGTGGAAGAAGCAGCCGCCGCCAGACCGTCGT
CCTCGGCGGGGGAGAAAGCAAGCAGCACGGATACCATCTCCGCTCCGGGTCGGGGTCCCGCTCGACCACACAG
TAGATGGGACGAGACCGGACGATTCCCGAACCCCACCACCCAGACCGGTAAGAAGGAGCGGCAGGGATACAA
GTCCTGGCGGGGGCACAAAAACGCCATCGTCTCCTGCTTGCAGGCCTGCGGGGGCAACATCTCCTTCACCCGGC
GCTACCTGCTCTTCCACCGCGGGGTGAACTTTCCCCGCAACATCTTGCATTACTACCGTCACCTCCACAGCCCCT
ACTACTTCCAAGAAGAGGCAGCAGCAGCAGAAAAAGACCAGCAGAAAACCAGCAGCTAGAAAATCCACAGCG
GCGGCAGCAGGTGGACTGAGGATCGCGGCGAACGAGCCGGCGCAAACCCGGGAGCTGAGGAACCGGATCTTT
CCCACCCTCTATGCCATCTTCCAGCAGAGTCGGGGGCAGGAGCAGGAACTGAAAGTCAAGAACCGTTCTCTGC
GCTCGCTCACCCGCAGTTGTCTGTATCACAAGAGCGAAGACCAACTTCAGCGCACTCTCGAGGACGCCGAGGC
TCTCTTCAACAAGTACTGCGCGCTCACTCTTAAAGAGTAGCCCGCGCCCGCCCAGTCGCAGAAAAAGGCGGGA
ATTACGTCACCTGTGCCCTTCGCCCTAGCCGCCTCCACCCATCATCATGAGCAAAGAGATTCCCACGCCTTACA
TGTGGAGCTACCAGCCCCAGATGGGCCTGGCCGCCGGTGCCGCCCAGGACTACTCCACCCGCATGAATTGGCT
CAGCGCCGGGCCCGCGATGATCTCACGGGTGAATGACATCCGCGCCCACCGAAACCAGATACTCCTAGAACAG
TCAGCGCTCACCGCCACGCCCCGCAATCACCTCAATCCGCGTAATTGGCCCGCCGCCCTGGTGTACCAGGAAAT
TCCCCAGCCCACGACCGTACTACTTCCGCGAGACGCCCAGGCCGAAGTCCAGCTGACTAACTCAGGTGTCCAG
CTGGCGGGCGGCGCCACCCTGTGTCGTCACCGCCCCGCTCAGGGTATAAAGCGGCTGGTGATCCGGGGCAGAG
GCACACAGCTCAACGACGAGGTGGTGAGCTCTTCGCTGGGTCTGCGACCTGACGGAGTCTTCCAACTCGCCGG
ATCGGGGAGATCTTCCTTCACGCCTCGTCAGGCCGTCCTGACTTTGGAGAGTTCGTCCTCGCAGCCCCGCTCGG
GTGGCATCGGCACTCTCCAGTTCGTGGAGGAGTTCACTCCCTCGGTCTACTTCAACCCCTTCTCCGGCTCCCCCG
GCCACTACCCGGACGAGTTCATCCCGAACTTCGACGCCATCAGCGAGTCGGTGGACGGCTACGATTGAAACTA
ATCACCCCCTTATCCAGTGAAATAAAGATCATATTGATGATGATTTTACAGAAATAAAAAATAATCATTTGATT
TGAAATAAAGATACAATCATATTGATGATTTGAGTTTAACAAAAAAATAAAGAATCACTTACTTGAAATCTGAT
ACCAGGTCTCTGTCCATGTTTTCTGCCAACACCACTTCACTCCCCTCTTCCCAGCTCTGGTACTGCAGGCCCCGG
CGGGCTGCAAACTTCCTCCACACGCTGAAGGGGATGTCAAATTCCTCCTGTCCCTCAATCTTCATTTTATCTTCT
ATCAGATGTCCAAAAAGCGCGTCCGGGTGGATGATGACTTCGACCCCGTCTACCCCTACGATGCAGACAACGC
ACCGACCGTGCCCTTCATCAACCCCCCCTTCGTCTCTTCAGATGGATTCCAAGAGAAGCCCCTGGGGGTGTTGT
CCCTGCGACTGGCCGACCCCGTCACCACCAAGAACGGGGAAATCACCCTCAAGCTGGGAGAGGGGGTGGACCT
CGATTCCTCGGGAAAACTCATCTCCAACACGGCCACCAAGGCCGCCGCCCCTCTCAGTTTTTCCAACAACACCA
TTTCCCTTAACATGGATCACCCCTTTTACACTAAAGATGGAAAATTATCCTTACAAGTTTCTCCACCATTAAATA
TACTGAGAACAAGCATTCTAAACACACTAGCTTTAGGTTTTGGATCAGGTTTAGGACTCCGTGGCTCTGCCTTG
GCAGTACAGTTAGTCTCTCCACTTACATTTGATACTGATGGAAACATAAAGCTTACCTTAGACAGAGGTTTGCA
TGTTACAACAGGAGATGCAATTGAAAGCAACATAAGCTGGGCTAAAGGTTTAAAATTTGAAGATGGAGCCATA
GCAACCAACATTGGAAATGGGTTAGAGTTTGGAAGCAGTAGTACAGAAACAGGTGTTGATGATGCTTACCCAA
TCCAAGTTAAACTTGGATCTGGCCTTAGCTTTGACAGTACAGGAGCCATAATGGCTGGTAACAAAGAAGACGA
TAAACTCACTTTGTGGACAACACCTGATCCATCACCAAACTGTCAAATACTCGCAGAAAATGATGCAAAACTA
ACACTTTGCTTGACTAAATGTGGTAGTCAAATACTGGCCACTGTGTCAGTCTTAGTTGTAGGAAGTGGAAACCT
AAACCCCATTACTGGCACCGTAAGCAGTGCTCAGGTGTTTCTACGTTTTGATGCAAACGGTGTTCTTTTAACAG
AACATTCTACACTAAAAAAATACTGGGGGTATAGGCAGGGAGATAGCATAGATGGCACTCCATATACCAATGC
TGTAGGATTCATGCCCAATTTAAAAGCTTATCCAAAGTCACAAAGTTCTACTACTAAAAATAATATAGTAGGGC
AAGTATACATGAATGGAGATGTTTCAAAACCTATGCTTCTCACTATAACCCTCAATGGTACTGATGACAGCAAC
AGTACATATTCAATGTCATTTTCATACACCTGGACTAATGGAAGCTATGTTGGAGCAACATTTGGGGCTAACTC
TTATACCTTCTCATACATCGCCCAAGAATGAACACTGTATCCCACCCTGCATGCCAACCCTTCCCACCCCACTCT
GTGGAACAAACTCTGAAACACAAAATAAAATAAAGTTCAAGTGTTTTATTGATTCAACAGTTTTACAGGATTCG
AGCAGTTATTTTTCCTCCACCCTCCCAGGACATGGAATACACCACCCTCTCCCCCCGCACAGCCTTGAACATCT
GAATGCCATTGGTGATGGACATGCTTTTGGTCTCCACGTTCCACACAGTTTCAGAGCGAGCCAGTCTCGGGTCG
GTCAGGGAGATGAAACCCTCCGGGCACTCCCGCATCTGCACCTCACAGCTCAACAGCTGAGGATTGTCCTCGGT
GGTCGGGATCACGGTTATCTGGAAGAAGCAGAAGAGCGGCGGTGGGAATCATAGTCCGCGAACGGGATCGGC
CGGTGGTGTCGCATCAGGCCCCGCAGCAGTCGCTGCCGCCGCCGCTCCGTCAAGCTGCTGCTCAGGGGGTCCG
GGTCCAGGGACTCCCTCAGCATGATGCCCACGGCCCTCAGCATCAGTCGTCTGGTGCGGCGGGCGCAGCAGCG
CATGCGGATCTCGCTCAGGTCGCTGCAGTACGTGCAACACAGAACCACCAGGTTGTTCAACAGTCCATAGTTCA
ACACGCTCCAGCCGAAACTCATCGCGGGAAGGATGCTACCCACGTGGCCGTCGTACCAGATCCTCAGGTAAAT
CAAGTGGTGCCCCCTCCAGAACACGCTGCCCACGTACATGATCTCCTTGGGCATGTGGCGGTTCACCACCTCCC
GGTACCACATCACCCTCTGGTTGAACATGCAGCCCCGGATGATCCTGCGGAACCACAGGGCCAGCACCGCCCC
GCCCGCCATGCAGCGAAGAGACCCCGGGTCCCGGCAATGGCAATGGAGGACCCACCGCTCGTACCCGTGGATC
ATCTGGGAGCTGAACAAGTCTATGTTGGCACAGCACAGGCATATGCTCATGCATCTCTTCAGCACTCTCAACTC
CTCGGGGGTCAAAACCATATCCCAGGGCACGGGGAACTCTTGCAGGACAGCGAACCCCGCAGAACAGGGCAA
TCCTCGCACAGAACTTACATTGTGCATGGACAGGGTATCGCAATCAGGCAGCACCGGGTGATCCTCCACCAGA
GAAGCGCGGGTCTCGGTCTCCTCACAGCGTGGTAAGGGGGCCGGCCGATACGGGTGATGGCGGGACGCGGCTG
ATCGTGTTCGCGACCGTGTCATGATGCAGTTGCTTTCGGACATTTTCGTACTTGCTGTAGCAGAACCTGGTCCGG
GCGCTGCACACCGATCGCCGGCGGCGGTCTCGGCGCTTGGAACGCTCGGTGTTGAAATTGTAAAACAGCCACT
CTCTCAGACCGTGCAGCAGATCTAGGGCCTCAGGAGTGATGAAGATCCCATCATGCCTGATGGCTCTGATCACA
TCGACCACCGTGGAATGGGCCAGACCCAGCCAGATGATGCAATTTTGTTGGGTTTCGGTGACGGCGAGCCTCG
GGAACAACGATGAAGTAAATGCAAGCGGTGCGTTCCAGCATGGTTAGTTAGCTGATCTGTAGAAAAAACAAAA
ATGAACATTAAACCATGCTAGCCTGGCGAACAGGTGGGTAAATCGTTCTCTCCAGCACCAGGCAGGCCACGGG
GTCTCCGGCGCGACCCTCGTAAAAATTGTCGCTATGATTGAAAACCATCACAGAGAGACGTTCCCGGTGGCCG
GCGTGAATGATTCGACAAGATGAATACACCCCCGGAACATTGGCGTCCGCGAGTGAAAAAAAGCGCCCGAGG
AAGCAATAAGGCACTACAATGCTCAGTCTCAAGTCCAGCAAAGCGATGCCATGCGGATGAAGCACAAAATTCT
CAGGTGCGTACAAAATGTAATTACTCCCCTCCTGCACAGGCAGCAAAGCCCCCGATCCCTCCAGGTACACATAC
AAAGCCTCAGCGTCCATAGCTTACCGAGCAGCAGCACACAACAGGCGCAAGAGTCAGAGAAAGGCTGAGCTC
TAACCTGTCCACCCGCTCTCTGCTCAATATATAGCCCAGATCTACACTGACGTAAAGGCCAAAGTCTAAAAATA
CCCGCCAAATAATCACACACGCCCAGCACACGCCCAGAAACCGGTGACACACTCAAAAAAATACGCGCACTTC
CTCAAACGCCCAAAACTGCCGTCATTTCCGGGTTCCCACGCTACGTCATCAAAACACGACTTTCAAATTCCGTC
GACCGTTAAAAACGTCACCCGCCCCGCCCCTAACGGTCGCCCGTCTCTCAGCCAATCAGCGCCCCGCATCCCCA
AATTCAAACACCTCATTTGCATATTAACGCGCACAAAAAGTTTGAGGTATATTATTGATGATG

[0474] Refer to Sequence Listing, SEQ ID NOS. 57-10,754. Predicted shared antigens associated with gene expressed at a level of at least 10 TPM in at least 0.98% of cancer cases. Each of the above sequence identifiers is associated with the gene name, amino acid sequence of the peptide, Ensembl ID, and corresponding HLA allele(s).

### CERTAIN SEQUENCES

[0475] Vectors, cassettes, and antibodies referred to herein are described below and referred to by SEQ ID NO.

### REFERENCES

[0476] 1. Desrichard, A., Snyder, A. & Chan, T. A. Cancer Neoantigens and Applications for Immunotherapy. Clin. Cancer Res. Off J. Am. Assoc. Cancer Res. (2015). doi:10.1158/1078-0432. CCR-14-3175
[0477] 2. Schumacher, T. N. & Schreiber, R. D. Neoantigens in cancer immunotherapy. Science 348, 69-74 (2015).
[0478] 3. Gubin, M. M., Artyomov, M. N., Mardis, E. R. & Schreiber, R. D. Tumor neoantigens: building a framework for personalized cancer immunotherapy. J. Clin. Invest. 125, 3413-3421 (2015).
[0479] 4. Rizvi, N. A. et al. Cancer immunology. Mutational landscape determines sensitivity to PD-1 blockade in non-small cell lung cancer. Science 348, 124-128 (2015).
[0480] 5. Snyder, A. et al. Genetic basis for clinical response to CTLA-4 blockade in melanoma. N. Engl. J. Med. 371, 2189-2199 (2014).
[0481] 6. Carreno, B. M. et al. Cancer immunotherapy. A dendritic cell vaccine increases the breadth and diversity of melanoma neoantigen-specific T cells. Science 348, 803-808 (2015).
[0482] 7. Tran, E. et al. Cancer immunotherapy based on mutation-specific CD4+ T cells in a patient with epithelial cancer. Science 344, 641-645 (2014).
[0483] 8. Hacohen, N. & Wu, C. J.-Y. United States Patent Application: 20110293637—COMPOSITIONS AND METHODS OF IDENTIFYING TUMOR SPECIFIC NEOANTIGENS. (A1). at <http://appftl.uspto.gov/netacgi/nph-Parser?Sect1=PTO1&Sect2=HITOFF&d=PG01&p=1&u=/netahtml/PTO/srchnum.html&r-1&f=G&l=50&s1=20110293637. PGNR.>
[0484] 9. Lundegaard, C., Hoof, I., Lund, O. & Nielsen, M. State of the art and challenges in sequence based T-cell epitope prediction. Immunome Res. 6 Suppl 2, S3 (2010).
[0485] 10. Yadav, M. et al. Predicting immunogenic tumour mutations by combining mass spectrometry and exome sequencing. Nature 515, 572-576 (2014).
[0486] 11. Bassani-Sternberg, M., Pletscher-Frankild, S., Jensen, L. J. & Mann, M. Mass spectrometry of human leukocyte antigen class I peptidomes reveals strong effects of protein abundance and turnover on antigen presentation. Mol. Cell. Proteomics MCP 14, 658-673 (2015).
[0487] 12. Van Allen, E. M. et al. Genomic correlates of response to CTLA-4 blockade in metastatic melanoma. Science 350, 207-211 (2015).
[0488] 13. Yoshida, K. & Ogawa, S. Splicing factor mutations and cancer. Wiley Interdiscip. Rev. RNA 5, 445-459 (2014).
[0489] 14. Cancer Genome Atlas Research Network. Comprehensive molecular profiling of lung adenocarcinoma. Nature 511, 543-550 (2014).
[0490] 15. Rajasagi, M. et al. Systematic identification of personal tumor-specific neoantigens in chronic lymphocytic leukemia. Blood 124, 453-462 (2014).
[0491] 16. Downing, S. R. et al. U.S. patent application Ser. No. 0120208706—OPTIMIZATION OF MULTIGENE ANALYSIS OF TUMOR SAMPLES. (A1). at <http://appft1.uspto.gov/netacgi/nph-Parser?Sect1=PTO1&Sect2=HITOFF&d=PG01&p=1&u=/netahtml/PTO/srchnum.html&r=1&f=G&l=50&s1=20120208706. PGNR.>
[0492] 17. Target Capture for NextGen Sequencing—IDT. at <http://www.idtdna.com/pages/products/nextgen/target-capture>
[0493] 18. Shukla, S. A. et al. Comprehensive analysis of cancer-associated somatic mutations in class I HLA genes. Nat. Biotechnol. 33, 1152-1158 (2015).
[0494] 19. Cieslik, M. et al. The use of exome capture RNA-seq for highly degraded RNA with application to clinical cancer sequencing. Genome Res. 25, 1372-1381 (2015).
[0495] 20. Bodini, M. et al. The hidden genomic landscape of acute myeloid leukemia: subclonal structure revealed by undetected mutations. Blood 125, 600-605 (2015).
[0496] 21. Saunders, C. T. et al. Strelka: accurate somatic small-variant calling from sequenced tumor-normal sample pairs. Bioinforma. Oxf Engl. 28, 1811-1817 (2012).
[0497] 22. Cibulskis, K. et al. Sensitive detection of somatic point mutations in impure and heterogeneous cancer samples. Nat. Biotechnol. 31, 213-219 (2013).
[0498] 23. Wilkerson, M. D. et al. Integrated RNA and DNA sequencing improves mutation detection in low purity tumors. Nucleic Acids Res. 42, e107 (2014).
[0499] 24. Mose, L. E., Wilkerson, M. D., Hayes, D. N., Perou, C. M. & Parker, J. S. ABRA: improved coding indel detection via assembly-based realignment. Bioinforma. Oxf Engl. 30, 2813-2815 (2014).
[0500] 25. Ye, K., Schulz, M. H., Long, Q., Apweiler, R. & Ning, Z. Pindel: a pattern growth approach to detect break points of large deletions and medium sized insertions from paired-end short reads. Bioinforma. Oxf Engl. 25, 2865-2871 (2009).
[0501] 26. Lam, H. Y. K. et al. Nucleotide-resolution analysis of structural variants using BreakSeq and a breakpoint library. Nat. Biotechnol. 28, 47-55 (2010).
[0502] 27. Frampton, G. M. et al. Development and validation of a clinical cancer genomic profiling test based on massively parallel DNA sequencing. Nat. Biotechnol. 31, 1023-1031 (2013).
[0503] 28. Boegel, S. et al. HLA typing from RNA-Seq sequence reads. Genome Med. 4, 102 (2012).
[0504] 29. Liu, C. et al. ATHLATES: accurate typing of human leukocyte antigen through exome sequencing. Nucleic Acids Res. 41, e142 (2013).
[0505] 30. Mayor, N. P. et al. HLA Typing for the Next Generation. PloS One 10, e0127153 (2015).
[0506] 31. Roy, C. K., Olson, S., Graveley, B. R., Zamore, P. D. & Moore, M. J. Assessing long-distance RNA sequence connectivity via RNA-templated DNA-DNA ligation. eLife 4, (2015).
[0507] 32. Song, L. & Florea, L. CLASS: constrained transcript assembly of RNA-seq reads. BMC Bioinformatics 14 Suppl 5, S14 (2013).
[0508] 33. Maretty, L., Sibbesen, J. A. & Krogh, A. Bayesian transcriptome assembly. Genome Biol. 15, 501 (2014).
[0509] 34. Pertea, M. et al. StringTie enables improved reconstruction of a transcriptome from RNA-seq reads. Nat. Biotechnol. 33, 290-295 (2015).
[0510] 35. Roberts, A., Pimentel, H., Trapnell, C. & Pachter, L. Identification of novel transcripts in annotated genomes using RNA-Seq. Bioinforma. Oxf Engl. (2011). doi:10.1093/bioinformatics/btr355
[0511] 36. Vitting-Seerup, K., Porse, B. T., Sandelin, A. & Waage, J. spliceR: an R package for classification of alternative splicing and prediction of coding potential from RNA-seq data. BMC Bioinformatics 15, 81 (2014).
[0512] 37. Rivas, M. A. et al. Human genomics. Effect of predicted protein-truncating genetic variants on the human transcriptome. Science 348, 666-669 (2015).
[0513] 38. Skelly, D. A., Johansson, M., Madeoy, J., Wakefield, J. & Akey, J. M. A powerful and flexible statistical framework for testing hypotheses of allele-specific gene expression from RNA-seq data. Genome Res. 21, 1728-1737 (2011).
[0514] 39. Anders, S., Pyl, P. T. & Huber, W. HTSeq—a Python framework to work with high-throughput sequencing data. Bioinforma. Oxf Engl. 31, 166-169 (2015).
[0515] 40. Furney, S. J. et al. SF3B1 mutations are associated with alternative splicing in uveal melanoma. Cancer Discov. (2013). doi:10.1158/2159-8290. CD-13-0330
[0516] 41. Zhou, Q. et al. A chemical genetics approach for the functional assessment of novel cancer genes. Cancer Res. (2015). doi:10.1158/0008-5472. CAN-14-2930
[0517] 42. Maguire, S. L. et al. SF3B1 mutations constitute a novel therapeutic target in breast cancer. J. Pathol. 235, 571-580 (2015).
[0518] 43. Carithers, L. J. et al. A Novel Approach to High-Quality Postmortem Tissue Procurement: The GTEx Project. Biopreservation Biobanking 13, 311-319 (2015).
[0519] 44. Xu, G. et al. RNA CoMPASS: a dual approach for pathogen and host transcriptome analysis of RNA-seq datasets. PloS One 9, e89445 (2014).
[0520] 45. Andreatta, M. & Nielsen, M. Gapped sequence alignment using artificial neural networks: application to the MHC class I system. Bioinforma. Oxf Engl. (2015). doi:10.1093/bioinformatics/btv639
[0521] 46. Jørgensen, K. W., Rasmussen, M., Buus, S. & Nielsen, M. NetMHCstab—predicting stability of peptide-MHC-I complexes; impacts for cytotoxic T lymphocyte epitope discovery. Immunology 141, 18-26 (2014).
[0522] 47. Larsen, M. V. et al. An integrative approach to CTL epitope prediction: a combined algorithm integrating MHC class I binding, TAP transport efficiency, and proteasomal cleavage predictions. Eur. J. Immunol. 35, 2295-2303 (2005).
[0523] 48. Nielsen, M., Lundegaard, C., Lund, O. & Ke mir, C. The role of the proteasome in generating cytotoxic T-cell epitopes: insights obtained from improved predictions of proteasomal cleavage. Immunogenetics 57, 33-41 (2005).
[0524] 49. Boisvert, F.-M. et al. A Quantitative Spatial Proteomics Analysis of Proteome Turnover in Human Cells. Mol. Cell. Proteomics 11, M111.011429-M111.011429 (2012).
[0525] 50. Duan, F. et al. Genomic and bioinformatic profiling of mutational neoepitopes reveals new rules to predict anticancer immunogenicity. J. Exp. Med. 211, 2231-2248 (2014).
[0526] 51. Janeway's Immunobiology: 9780815345312: Medicine & Health Science Books @ Amazon.com. at <http://www.amazon.com/Janeways-Immunobiology-Kenneth-Murphy/dp/0815345313>
[0527] 52. Calis, J. J. A. et al. Properties of MHC Class I Presented Peptides That Enhance Immunogenicity. PLoS Comput. Biol. 9, e1003266 (2013).
[0528] 53. Zhang, J. et al. Intratumor heterogeneity in localized lung adenocarcinomas delineated by multiregion sequencing. Science 346, 256-259 (2014)
[0529] 54. Walter, M. J. et al. Clonal architecture of secondary acute myeloid leukemia. N. Engl. J. Med. 366, 1090-1098 (2012).
[0530] 55. Hunt D F, Henderson R A, Shabanowitz J, Sakaguchi K, Michel H, Sevilir N, Cox A L, Appella E, Engelhard V H. Characterization of peptides bound to the class I MHC molecule HLA-A2.1 by mass spectrometry. Science 1992. 255: 1261-1263.
[0531] 56. Zarling A L, Polefrone J M, Evans A M, Mikesh L M, Shabanowitz J, Lewis S T, Engelhard V H, Hunt D F. Identification of class I MHC-associated phosphopeptides as targets for cancer immunotherapy. Proc Natl Acad Sci USA. 2006 Oct. 3; 103(40):14889-94.
[0532] 57. Bassani-Sternberg M, Pletscher-Frankild S, Jensen L J, Mann M. Mass spectrometry of human leukocyte antigen class I peptidomes reveals strong effects of protein abundance and turnover on antigen presentation. Mol Cell Proteomics. 2015 March; 14(3):658-73. doi: 10.1074/mcp. M114.042812.
[0533] 58. Abelin J G, Trantham P D, Penny S A, Patterson A M, Ward S T, Hildebrand W H, Cobbold M, Bai D L, Shabanowitz J, Hunt D F. Complementary IMAC enrichment methods for HLA-associated phosphopeptide identification by mass spectrometry. Nat Protoc. 2015 September; 10(9):1308-18. doi: 10.1038/nprot.2015.086. Epub 2015 Aug. 6
[0534] 59. Barnstable C J, Bodmer W F, Brown G, Galfre G, Milstein C, Williams A F, Ziegler A. Production of monoclonal antibodies to group A erythrocytes, HLA and other human cell surface antigens-new tools for genetic analysis. Cell. 1978 May; 14(1):9-20.
[0535] 60. Goldman J M, Hibbin J, Kearney L, Orchard K, Th'ng KH. HLA-DR monoclonal antibodies inhibit the proliferation of normal and chronic granulocytic leukaemia myeloid progenitor cells. Br J Haematol. 1982 November; 52(3):411-20.
[0536] 61. Eng J K, Jahan T A, Hoopmann M R. Comet: an open-source MS/MS sequence database search tool. Proteomics. 2013 January; 13(1):22-4. doi: 10.1002/pmic.201200439. Epub 2012 Dec. 4.
[0537] 62. Eng J K, Hoopmann M R, Jahan T A, Egertson J D, Noble W S, MacCoss MJ. A deeper look into Comet—implementation and features. J Am Soc Mass Spectrom. 2015 November; 26(11):1865-74. doi: 10.1007/s13361-015-1179-x. Epub 2015 Jun. 27.
[0538] 63. Lukas Käll, Jesse Canterbury, Jason Weston, William Stafford Noble and Michael J. MacCoss. Semi-supervised learning for peptide identification from shotgun proteomics datasets. Nature Methods 4:923-925, November 2007
[0539] 64. Lukas Käll, John D. Storey, Michael J. MacCoss and William Stafford Noble. Assigning confidence measures to peptides identified by tandem mass spectrometry. Journal of Proteome Research, 7(1):29-34, January 2008
[0540] 65. Lukas Käll, John D. Storey and William Stafford Noble. Nonparametric estimation of posterior error probabilities associated with peptides identified by tandem mass spectrometry. Bioinformatics, 24(16):i42-i48, August 2008
[0541] 66. Kinney R M, BJ Johnson, VL Brown, DW Trent. Nucleotide Sequence of the 26 S mRNA of the Virulent Trinidad Donkey Strain of Venezuelan Equine Encephalitis Virus and Deduced Sequence of the Encoded Structural Proteins. Virology 152 (2), 400-413. 1986 Jul. 30.
[0542] 67. Jill E Slansky, Frédérique M Rattis, Lisa F Boyd, Tarek Fahmy, Elizabeth M Jaffee, Jonathan P Schneck, David H Margulies, Drew M Pardoll. Enhanced Antigen-Specific Antitumor Immunity with Altered Peptide Ligands that Stabilize the MHC-Peptide-T CR Complex. Immunity, Volume 13, Issue 4, 1 Oct. 2000, Pages 529-538.
[0543] 68. A Y Huang, P H Gulden, A S Woods, M C Thomas, C D Tong, W Wang, V H Engelhard, G Pasternack, R Cotter, D Hunt, D M Pardoll, and E M Jaffee. The immunodominant major histocompatibility complex class I-restricted antigen of a murine colon tumor derives from an endogenous retroviral gene product. Proc Natl Acad Sci USA.; 93(18): 9730-9735, 1996 Sep. 3.
[0544] 69. JOHNSON, BARBARA J. B., RICHARD M. KINNEY, CRYSTLE L. KOST AND DENNIS W. TRENT. Molecular Determinants of Alphavirus Neurovirulence: Nucleotide and Deduced Protein Sequence Changes during Attenuation of Venezuelan Equine Encephalitis Virus. J Gen Virol 67:1951-1960, 1986.
[0545] 70. Aarnoudse, C. A., Krüse, M., Konopitzky, R., Brouwenstijn, N., and Schrier, P. I. (2002). TCR reconstitution in Jurkat reporter cells facilitates the identification of novel tumor antigens by cDNA expression cloning. Int J Cancer 99, 7-13.
[0546] 71. Alexander, J., Sidney, J., Southwood, S., Ruppert, J., Oseroff, C., Maewal, A., Snoke, K., Serra, H. M., Kubo, R. T., and Sette, A. (1994). Development of high potency universal DR-restricted helper epitopes by modification of high affinity DR-blocking peptides. Immunity 1, 751-761.
[0547] 72. Banu, N., Chia, A., Ho, Z. Z., Garcia, A. T., Paravasivam, K., Grotenbreg, G. M., Bertoletti, A., and Gehring, A. J. (2014). Building and optimizing a virus-specific T cell receptor library for targeted immunotherapy in viral infections. Scientific Reports 4, 4166.
[0548] 73. Cornet, S., Miconnet, I., Menez, J., Lemonnier, F., and Kosmatopoulos, K. (2006). Optimal organization of a polypeptide-based candidate cancer vaccine composed of cryptic tumor peptides with enhanced immunogenicity. Vaccine 24, 2102-2109.
[0549] 74. Depla, E., van der Aa, A., Livingston, B. D., Crimi, C., Allosery, K., de Brabandere, V., Krakover, J., Murthy, S., Huang, M., Power, S., et al. (2008). Rational design of a multiepitope vaccine encoding T-lymphocyte epitopes for treatment of chronic hepatitis B virus infections. Journal of Virology 82, 435-450.
[0550] 75. Ishioka, G. Y., Fikes, J., Hermanson, G., Livingston, B., Crimi, C., Qin, M., del Guercio, M. F., Oseroff, C., Dahlberg, C., Alexander, J., et al. (1999). Utilization of MHC class I transgenic mice for development of minigene DNA vaccines encoding multiple HLA-restricted CTL epitopes. J Immunol 162, 3915-3925.
[0551] 76. Janetzki, S., Price, L., Schroeder, H., Britten, C. M., Welters, M. J. P., and Hoos, A. (2015). Guidelines for the automated evaluation of Elispot assays. Nat Protoc 10, 1098-1115.
[0552] 77. Lyons, G. E., Moore, T., Brasic, N., Li, M., Roszkowski, J. J., and Nishimura, M. I. (2006). Influence of human CD8 on antigen recognition by T-cell receptor-transduced cells. Cancer Res 66, 11455-11461.
[0553] 78. Nagai, K., Ochi, T., Fujiwara, H., An, J., Shirakata, T., Mineno, J., Kuzushima, K., Shiku, H., Melenhorst, J. J., Gostick, E., et al. (2012). Aurora kinase A-specific T-cell receptor gene transfer redirects T lymphocytes to display effective antileukemia reactivity. Blood 119, 368-376.
[0554] 79. Panina-Bordignon, P., Tan, A., Termijtelen, A., Demotz, S., Corradin, G., and Lanzavecchia, A. (1989). Universally immunogenic T cell epitopes: promiscuous binding to human MHC class II and promiscuous recognition by T cells. Eur J Immunol 19, 2237-2242.
[0555] 80. Vitiello, A., Marchesini, D., Furze, J., Sherman, L. A., and Chesnut, R. W. (1991). Analysis of the HLA-restricted influenza-specific cytotoxic T lymphocyte response in transgenic mice carrying a chimeric human-mouse class I major histocompatibility complex. J Exp Med 173, 1007-1015.
[0556] 81. Yachi, P. P., Ampudia, J., Zal, T., and Gascoigne, N. R. J. (2006). Altered peptide ligands induce delayed CD8-T cell receptor interaction—a role for CD8 in distinguishing antigen quality. Immunity 25, 203-211.
[0557] 82. Pushko P, Parker M, Ludwig G V, Davis N L, Johnston R E, Smith J F. Replicon-helper systems from attenuated Venezuelan equine encephalitis virus: expression of heterologous genes in vitro and immunization against heterologous pathogens in vivo. Virology. 1997 Dec. 22; 239(2):389-401.
[0558] 83. Strauss, JH and E G Strauss. The alphaviruses: gene expression, replication, and evolution. Microbiol Rev. 1994 September; 58(3): 491-562.
[0559] 84. Rhême C, Ehrengruber M U, Grandgirard D. Alphaviral cytotoxicity and its implication in vector development. Exp Physiol. 2005 January; 90(1):45-52. Epub 2004 Nov. 12.
[0560] 85. Riley, Michael K. II, and Wilfred Vermerris. Recent Advances in Nanomaterials for Gene Delivery—A Review. Nanomaterials 2017, 7(5), 94.
[0561] 86. Frolov I, Hardy R, Rice C M. Cis-acting RNA elements at the 5′ end of Sindbis virus genome RNA regulate minus- and plus-strand RNA synthesis. RNA. 2001 November; 7(11):1638-51.
[0562] 87. Jose J, Snyder J E, Kuhn R J. A structural and functional perspective of alphavirus replication and assembly. Future Microbiol. 2009 September; 4(7):837-56.
[0563] 88. Bo Li and C. olin N. Dewey. RSEM: accurate transcript quantification from RNA-Seq data with or without a referenfe genome. BMC Bioinformatics, 12:323, August 2011
[0564] 89. Hillary Pearson, Tariq Daouda, Diana Paola Granados, Chantal Durette, Eric Bonneil, Mathieu Courcelles, Anja Rodenbrock, Jean-Philippe Laverdure, Caroline Côté, Sylvie Mader, Sébastien Lemieux, Pierre Thibault, and Claude Perreault. MHC class I-associated peptides derive from selective regions of the human genome. The Journal of Clinical Investigation, 2016,
[0565] 90. Juliane Liepe, Fabio Marino, John Sidney, Anita Jeko, Daniel E. Bunting, Alessandro Sette, Peter M. Kloetzel, Michael P. H. Stumpf, Albert J. R. Heck, Michele Mishto. A large fraction of HLA class I ligands are proteasome-generated spliced peptides. Science, 21, October 2016.
[0566] 91. Mommen G P., Marino, F., Meiring H D., Poelen, MC., van Gaans-van den Brink, JA., Mohammed S., Heck A J., and van Els C A. Sampling From the Proteome to the Human Leukocyte Antigen-DR (HLA-DR) Ligandome Proceeds Via High Specificity. Mol Cell Proteomics 15(4): 1412-1423, April 2016.
[0567] 92. Sebastian Kreiter, Mathias Vormehr, Niels van de Roemer, Mustafa Diken, Martin Löwer, Jan Diekmann, Sebastian Boegel, Barbara Schrörs, Fulvia Vascotto, John C. Castle, Arbel D. Tadmor, Stephen P. Schoenberger, Christoph Huber, Özlem Türeci, and Ugur Sahin. Mutant MHC class II epitopes drive therapeutic immune responses to caner. Nature 520, 692-696, April 2015.
[0568] 93. Tran E., Turcotte S., Gros A., Robbins P. F., Lu Y. C., Dudley M. E., Wunderlich J. R., Somerville R. P., Hogan K., Hinrichs C. S., Parkhurst M. R., Yang J. C., Rosenberg S. A. Cancer immunotherapy based on mutation-specific CD4+ T cells in a patient with epithelial cancer. Science 344(6184) 641-645, May 2014.
[0569] 94. Andreatta M., Karosiene E., Rasmussen M., Stryhn A., Buus S., Nielsen M. Accurate pan-specific prediction of peptide-MHC class II binding affinity with improved binding core identification. Immunogenetics 67(11-12) 641-650, November 2015.
[0570] 95. Nielsen, M., Lund, O. NN-align. An artificial neural network-based alignment algorithm for MHC class II peptide binding prediction. BMC Bioinformatics 10:296, September 2009.
[0571] 96. Nielsen, M., Lundegaard, C., Lund, O. Prediction of MHC class II binding affinity using SMM-align, a novel stabilization matrix alignment method. BMC Bioinformatics 8:238, July 2007.
[0572] 97. Zhang, J., et al. PEAKS DB: de novo sequencing assisted database search for sensitive and accurate peptide identification. Molecular & Cellular Proteomics. 11(4):1-8. 1/2/2012.
[0573] 98. Jensen, Kamilla Kjaergaard, et al. “Improved Methods for Prediting Peptide Binding Affinity to MHC Class II Molecules.” Immunology, 2018, doi:10.1111/imm.12889.
[0574] 99. Carter, S. L., Cibulskis, K., Helman, E., McKenna, A., Shen, H., Zack, T., Laird, P. W., Onofrio, R. C., Winckler, W., Weir, B. A., et al. (2012). Absolute quantification of somatic DNA alterations in human cancer. Nat. Biotechnol. 30, 413-421
[0575] 100. McGranahan, N., Rosenthal, R., Hiley, C. T., Rowan, A. J., Watkins, T. B. K., Wilson, G. A., Birkbak, N. J., Veeriah, S., Van Loo, P., Herrero, J., et al. (2017). Allele-Specific HLA Loss and Immune Escape in Lung Cancer Evolution. Cell 171, 1259-1271.e11.
[0576] 101. Shukla, S. A., Rooney, M. S., Rajasagi, M., Tiao, G., Dixon, P. M., Lawrence, M. S., Stevens, J., Lane, W. J., Dellagatta, J. L., Steelman, S., et al. (2015). Comprehensive analysis of cancer-associated somatic mutations in class I HLA genes. Nat. Biotechnol. 33, 1152-1158.
[0577] 102. Van Loo, P., Nordgard, S. H., Lingjærde, O. C., Russnes, H. G., Rye, I. H., Sun, W., Weigman, V. J., Marynen, P., Zetterberg, A., Naume, B., et al. (2010). Allele-specific copy number analysis of tumors. Proc. Natl. Acad. Sci. U.S.A 107, 16910-16915.
[0578] 103. Van Loo, P., Nordgard, S. H., Lingjorde, O. C., Russnes, H. G., Rye, I. H., Sun, W., Weigman, V. J., Marynen, P., Zetterberg, A., Naume, B., et al. (2010). Allele-specific copy number analysis of tumors. Proc. Natl. Acad. Sci. U.S.A 107, 16910-16915.

The application's sequence listing, which the Patent Office published only in electronic form, follows.

SEQUENCE LISTING (29527 sequences)

SEQ ID NO: 1-2 - skipped (2 entries)

SEQ ID NO: 3 - RNA, 11447 nt, Venezuelan equine encephalitis virus
  source 1..11447: mol_type = other RNA
atgggcggcgcatgagagaagcccagaccaattacctacccaaaatggagaaagttcacgttgacatcgaggaagacagcccattcctcagagctttgcagcggagcttcccgcagtttgaggtagaagccaagcaggtcactgataatgaccatgctaatgccagagcgttttcgcatctggcttcaaaactgatcgaaacggaggtggacccatccgacacgatccttgacattggaagtgcgcccgcccgcagaatgtattctaagcacaagtatcattgtatctgtccgatgagatgtgcggaagatccggacagattgtataagtatgcaactaagctgaagaaaaactgtaaggaaataactgataaggaattggacaagaaaatgaaggagctcgccgccgtcatgagcgaccctgacctggaaactgagactatgtgcctccacgacgacgagtcgtgtcgctacgaagggcaagtcgctgtttaccaggatgtatacgcggttgacggaccgacaagtctctatcaccaagccaataagggagttagagtcgcctactggataggctttgacaccaccccttttatgtttaagaacttggctggagcatatccatcatactctaccaactgggccgacgaaaccgtgttaacggctcgtaacataggcctatgcagctctgacgttatggagcggtcacgtagagggatgtccattcttagaaagaagtatttgaaaccatccaacaatgttctattctctgttggctcgaccatctaccacgagaagagggacttactgaggagctggcacctgccgtctgtatttcacttacgtggcaagcaaaattacacatgtcggtgtgagactatagttagttgcgacgggtacgtcgttaaaagaatagctatcagtccaggcctgtatgggaagccttcaggctatgctgctacgatgcaccgcgagggattcttgtgctgcaaagtgacagacacattgaacggggagagggtctcttttcccgtgtgcacgtatgtgccagctacattgtgtgaccaaatgactggcatactggcaacagatgtcagtgcggacgacgcgcaaaaactgctggttgggctcaaccagcgtatagtcgtcaacggtcgcacccagagaaacaccaataccatgaaaaattaccttttgcccgtagtggcccaggcatttgctaggtgggcaaaggaatataaggaagatcaagaagatgaaaggccactaggactacgagatagacagttagtcatggggtgttgttgggcttttagaaggcacaagataacatctatttataagcgcccggatacccaaaccatcatcaaagtgaacagcgatttccactcattcgtgctgcccaggataggcagtaacacattggagatcgggctgagaacaagaatcaggaaaatgttagaggagcacaaggagccgtcacctctcattaccgccgaggacgtacaagaagctaagtgcgcagccgatgaggctaaggaggtgcgtgaagccgaggagttgcgcgcagctctaccacctttggcagctgatgttgaggagcccactctggaagccgatgtcgacttgatgttacaagaggctggggccggctcagtggagacacctcgtggcttgataaaggttaccagctacgctggcgaggacaagatcggctcttacgctgtgctttctccgcaggctgtactcaagagtgaaaaattatcttgcatccaccctctcgctgaacaagtcatagtgataacacactctggccgaaaagggcgttatgccgtggaaccataccatggtaaagtagtggtgccagagggacatgcaatacccgtccaggactttcaagctctgagtgaaagtgccaccattgtgtacaacgaacgtgagttcgtaaacaggtacctgcaccatattgccacacatggaggagcgctgaacactgatgaagaatattacaaaactgtcaagcccagcgagcacgacggcgaatacctgtacgacatcgacaggaaacagtgcgtcaagaaagaactagtcactgggctagggctcacaggcgagctggtggatcctcccttccatgaattcgcctacgagagtctgagaacacgaccagccgctccttaccaagtaccaaccataggggtgtatggcgtgccaggatcaggcaagtctggcatcattaaaagcgcagtcaccaaaaaagatctagtggtgagcgccaagaaagaaaactgtgcagaaattataagggacgtcaagaaaatgaaagggctggacgtcaatgccagaactgtggactcagtgctcttgaatggatgcaaacaccccgtagagaccctgtatattgacgaagcttttgcttgtcatgcaggtactctcagagcgctcatagccattataagacctaaaaaggcagtgctctgcggggatcccaaacagtgcggtttttttaacatgatgtgcctgaaagtgcattttaaccacgagatttgcacacaagtcttccacaaaagcatctctcgccgttgcactaaatctgtgacttcggtcgtctcaaccttgttttacgacaaaaaaatgagaacgacgaatccgaaagagactaagattgtgattgacactaccggcagtaccaaacctaagcaggacgatctcattctcacttgtttcagagggtgggtgaagcagttgcaaatagattacaaaggcaacgaaataatgacggcagctgcctctcaagggctgacccgtaaaggtgtgtatgccgttcggtacaaggtgaatgaaaatcctctgtacgcacccacctcagaacatgtgaacgtcctactgacccgcacggaggaccgcatcgtgtggaaaacactagccggcgacccatggataaaaacactgactgccaagtaccctgggaatttcactgccacgatagaggagtggcaagcagagcatgatgccatcatgaggcacatcttggagagaccggaccctaccgacgtcttccagaataaggcaaacgtgtgttgggccaaggctttagtgccggtgctgaagaccgctggcatagacatgaccactgaacaatggaacactgtggattattttgaaacggacaaagctcactcagcagagatagtattgaaccaactatgcgtgaggttctttggactcgatctggactccggtctattttctgcacccactgttccgttatccattaggaataatcactgggataactccccgtcgcctaacatgtacgggctgaataaagaagtggtccgtcagctctctcgcaggtacccacaactgcctcgggcagttgccactggaagagtctatgacatgaacactggtacactgcgcaattatgatccgcgcataaacctagtacctgtaaacagaagactgcctcatgctttagtcctccaccataatgaacacccacagagtgacttttcttcattcgtcagcaaattgaagggcagaactgtcctggtggtcggggaaaagttgtccgtcccaggcaaaatggttgactggttgtcagaccggcctgaggctaccttcagagctcggctggatttaggcatcccaggtgatgtgcccaaatatgacataatatttgttaatgtgaggaccccatataaataccatcactatcagcagtgtgaagaccatgccattaagcttagcatgttgaccaagaaagcttgtctgcatctgaatcccggcggaacctgtgtcagcataggttatggttacgctgacagggccagcgaaagcatcattggtgctatagcgcggcagttcaagttttcccgggtatgcaaaccgaaatcctcacttgaagagacggaagttctgtttgtattcattgggtacgatcgcaaggcccgtacgcacaatccttacaagctttcatcaaccttgaccaacatttatacaggttccagactccacgaagccggatgtgcaccctcatatcatgtggtgcgaggggatattgccacggccaccgaaggagtgattataaatgctgctaacagcaaaggacaacctggcggaggggtgtgcggagcgctgtataagaaattcccggaaagcttcgatttacagccgatcgaagtaggaaaagcgcgactggtcaaaggtgcagctaaacatatcattcatgccgtaggaccaaacttcaacaaagtttcggaggttgaaggtgacaaacagttggcagaggcttatgagtccatcgctaagattgtcaacgataacaattacaagtcagtagcgattccactgttgtccaccggcatcttttccgggaacaaagatcgactaacccaatcattgaaccatttgctgacagctttagacaccactgatgcagatgtagccatatactgcagggacaagaaatgggaaatgactctcaaggaagcagtggctaggagagaagcagtggaggagatatgcatatccgacgactcttcagtgacagaacctgatgcagagctggtgagggtgcatccgaagagttctttggctggaaggaagggctacagcacaagcgatggcaaaactttctcatatttggaagggaccaagtttcaccaggcggccaaggatatagcagaaattaatgccatgtggcccgttgcaacggaggccaatgagcaggtatgcatgtatatcctcggagaaagcatgagcagtattaggtcgaaatgccccgtcgaagagtcggaagcctccacaccacctagcacgctgccttgcttgtgcatccatgccatgactccagaaagagtacagcgcctaaaagcctcacgtccagaacaaattactgtgtgctcatcctttccattgccgaagtatagaatcactggtgtgcagaagatccaatgctcccagcctatattgttctcaccgaaagtgcctgcgtatattcatccaaggaagtatctcgtggaaacaccaccggtagacgagactccggagccatcggcagagaaccaatccacagaggggacacctgaacaaccaccacttataaccgaggatgagaccaggactagaacgcctgagccgatcatcatcgaagaggaagaagaggatagcataagtttgctgtcagatggcccgacccaccaggtgctgcaagtcgaggcagacattcacgggccgccctctgtatctagctcatcctggtccattcctcatgcatccgactttgatgtggacagtttatccatacttgacaccctggagggagctagcgtgaccagcggggcaacgtcagccgagactaactcttacttcgcaaagagtatggagtttctggcgcgaccggtgcctgcgcctcgaacagtattcaggaaccctccacatcccgctccgcgcacaagaacaccgtcacttgcacccagcagggcctgctcgagaaccagcctagtttccaccccgccaggcgtgaatagggtgatcactagagaggagctcgaggcgcttaccccgtcacgcactcctagcaggtcggtctcgagaaccagcctggtctccaacccgccaggcgtaaatagggtgattacaagagaggagtttgaggcgttcgtagcacaacaacaatgacggtttgatgcgggtgcatacatcttttcctccgacaccggtcaagggcatttacaacaaaaatcagtaaggcaaacggtgctatccgaagtggtgttggagaggaccgaattggagatttcgtatgccccgcgcctcgaccaagaaaaagaagaattactacgcaagaaattacagttaaatcccacacctgctaacagaagcagataccagtccaggaaggtggagaacatgaaagccataacagctagacgtattctgcaaggcctagggcattatttgaaggcagaaggaaaagtggagtgctaccgaaccctgcatcctgttcctttgtattcatctagtgtgaaccgtgccttttcaagccccaaggtcgcagtggaagcctgtaacgccatgttgaaagagaactttccgactgtggcttcttactgtattattccagagtacgatgcctatttggacatggttgacggagcttcatgctgcttagacactgccagtttttgccctgcaaagctgcgcagctttccaaagaaacactcctatttggaacccacaatacgatcggcagtgccttcagcgatccagaacacgctccagaacgtcctggcagctgccacaaaaagaaattgcaatgtcacgcaaatgagagaattgcccgtattggattcggcggcctttaatgtggaatgcttcaagaaatatgcgtgtaataatgaatattgggaaacgtttaaagaaaaccccatcaggcttactgaagaaaacgtggtaaattacattaccaaattaaaaggaccaaaagctgctgctctttttgcgaagacacataatttgaatatgttgcaggacataccaatggacaggtttgtaatggacttaaagagagacgtgaaagtgactccaggaacaaaacatactgaagaacggcccaaggtacaggtgatccaggctgccgatccgctagcaacagcgtatctgtgcggaatccaccgagagctggttaggagattaaatgcggtcctgcttccgaacattcatacactgtttgatatgtcggctgaagactttgacgctattatagccgagcacttccagcctggggattgtgttctggaaactgacatcgcgtcgtttgataaaagtgaggacgacgccatggctctgaccgcgttaatgattctggaagacttaggtgtggacgcagagctgttgacgctgattgaggcggctttcggcgaaatttcatcaatacatttgcccactaaaactaaatttaaattcggagccatgatgaaatctggaatgttcctcacactgtttgtgaacacagtcattaacattgtaatcgcaagcagagtgttgagagaacggctaaccggatcaccatgtgcagcattcattggagatgacaatatcgtgaaaggagtcaaatcggacaaattaatggcagacaggtgcgccacctggttgaatatggaagtcaagattatagatgctgtggtgggcgagaaagcgccttatttctgtggagggtttattttgtgtgactccgtgaccggcacagcgtgccgtgtggcagaccccctaaaaaggctgtttaagcttggcaaacctctggcagcagacgatgaacatgatgatgacaggagaagggcattgcatgaagagtcaacacgctggaaccgagtgggtattctttcagagctgtgcaaggcagtagaatcaaggtatgaaaccgtaggaacttccatcatagttatggccatgactactctagctagcagtgttaaatcattcagctacctgagaggggcccctataactctctacggctaacctgaatggactacgacatagtctagtccgccaagatgttcccgttccagccaatgtatccgatgcagccaatgccctatcgcaacccgttcgcggccccgcgcaggccctggttccccagaaccgacccttttctggcgatgcaggtgcaggaattaacccgctcgatggctaacctgacgttcaagcaacgccgggacgcgccacctgaggggccatccgctaagaaaccgaagaaggaggcctcgcaaaaacagaaagggggaggccaagggaagaagaagaagaaccaagggaagaagaaggctaagacagggccgcctaatccgaaggcacagaatggaaacaagaagaagaccaacaagaaaccaggcaagagacagcgcatggtcatgaaattggaatctgacaagacgttcccaatcatgttggaagggaagataaacggctacgcttgtgtggtcggagggaagttattcaggccgatgcatgtggaaggcaagatcgacaacgacgttctggccgcgcttaagacgaagaaagcatccaaatacgatcttgagtatgcagatgtgccacagaacatgcgggccgatacattcaaatacacccatgagaaaccccaaggctattacagctggcatcatggagcagtccaatatgaaaatgggcgtttcacggtgccgaaaggagttggggccaagggagacagcggacgacccattctggataaccagggacgggtggtcgctattgtgctgggaggtgtgaatgaaggatctaggacagccctttcagtcgtcatgtggaacgagaagggagttaccgtgaagtatactccggagaactgcgagcaatggtcactagtgaccaccatgtgtctgctcgccaatgtgacgttcccatgtgctcaaccaccaatttgctacgacagaaaaccagcagagactttggccatgctcagcgttaacgttgacaacccgggctacgatgagctgctggaagcagctgttaagtgccccggaaggaaaaggagatccaccgaggagctgtttaaggagtataagctaacgcgcccttacatggccagatgcatcagatgtgcagttgggagctgccatagtccaatagcaatcgaggcagtaaagagcgacgggcacgacggttatgttagacttcagacttcctcgcagtatggcctggattcctccggcaacttaaagggcaggaccatgcggtatgacatgcacgggaccattaaagagataccactacatcaagtgtcactccatacatctcgcccgtgtcacattgtggatgggcacggttatttcctgcttgccaggtgcccggcaggggactccatcaccatggaatttaagaaagattccgtcacacactcctgctcggtgccgtatgaagtgaaatttaatcctgtaggcagagaactctatactcatcccccagaacacggagtagagcaagcgtgccaagtctacgcacatgatgcacagaacagaggagcttatgtcgagatgcacctcccgggctcagaagtggacagcagtttggtttccttgagcggcagttcagtcaccgtgacacctcctgttgggactagcgccctggtggaatgcgagtgtggcggcacaaagatctccgagaccatcaacaagacaaaacagttcagccagtgcacaaagaaggagcagtgcagagcatatcggctgcagaacgataagtgggtgtataattctgacaaactgcccaaagcagcgggagccaccttaaaaggaaaactgcatgtcccattcttgctggcagacggcaaatgcaccgtgcctctagcaccagaacctatgataacctttggtttcagatcagtgtcactgaaactgcaccctaagaatcccacatatctaaccacccgccaacttgctgatgagcctcactacacgcacgagctcatatctgaaccagctgttaggaattttaccgtcaccgaaaaagggtgggagtttgtatggggaaaccacccgccgaaaaggttttgggcacaggaaacagcacccggaaatccacatgggctaccgcacgaggtgataactcattattaccacagataccctatgtccaccatcctgggtttgtcaatttgtgccgccattgcaaccgtttccgttgcagcgtctacctggctgttttgcagatctagagttgcgtgcctaactccttaccggctaacacctaacgctaggataccattttgtctggctgtgctttgctgcgcccgcactgcccgggccgagaccacctgggagtccttggatcacctatggaacaataaccaacagatgttctggattcaattgctgatccctctggccgccttgatcgtagtgactcgcctgctcaggtgcgtgtgctgtgtcgtgccttttttagtcatggccggcgccgcaggcgccggcgcctacgagcacgcgaccacgatgccgagccaagcgggaatctcgtataacactatagtcaacagagcaggctacgcaccactccctatcagcataacaccaacaaagatcaagctgatacctacagtgaacttggagtacgtcacctgccactacaaaacaggaatggattcaccagccatcaaatgctgcggatctcaggaatgcactccaacttacaggcctgatgaacagtgcaaagtcttcacaggggtttacccgttcatgtggggtggtgcatattgcttttgcgacactgagaacacccaagtcagcaaggcctacgtaatgaaatctgacgactgccttgcggatcatgctgaagcatataaagcgcacacagcctcagtgcaggcgttcctcaacatcacagtgggagaacactctattgtgactaccgtgtatgtgaatggagaaactcctgtgaatttcaatggggtcaaattaactgcaggtccgctttccacagcttggacaccctttgatcgcaaaatcgtgcagtatgccggggagatctataattatgattttcctgagtatggggcaggacaaccaggagcatttggagatatacaatccagaacagtctcaagctcagatctgtatgccaataccaacctagtgctgcagagacccaaagcaggagcgatccacgtgccatacactcaggcaccttcgggttttgagcaatggaagaaagataaagctccatcattgaaatttaccgcccctttcggatgcgaaatatatacaaaccccattcgcgccgaaaactgtgctgtagggtcaattccattagcctttgacattcccgacgccttgttcaccagggtgtcagaaacaccgacactttcagcggccgaatgcactcttaacgagtgcgtgtattcttccgactttggtgggatcgccacggtcaagtactcggccagcaagtcaggcaagtgcgcagtccatgtgccatcagggactgctaccctaaaagaagcagcagtcgagctaaccgagcaagggtcggcgactatccatttctcgaccgcaaatatccacccggagttcaggctccaaatatgcacatcatatgttacgtgcaaaggtgattgtcaccccccgaaagaccatattgtgacacaccctcagtatcacgcccaaacatttacagccgcggtgtcaaaaaccgcgtggacgtggttaacatccctgctgggaggatcagccgtaattattataattggcttggtgctggctactattgtggccatgtacgtgctgaccaaccagaaacataattgaatacagcagcaattggcaagctgcttacatagaactcgcggcgattggcatgccgccttaaaatttttattttattttttcttttcttttccgaatcggattttgtttttaatatttc

SEQ ID NO: 4 - skipped

SEQ ID NO: 5 - RNA, 11446 nt, Venezuelan equine encephalitis virus
  source 1..11446: mol_type = other RNA
ataggcggcgcatgagagaagcccagaccaattacctacccaaaatggagaaagttcacgttgacatcgaggaagacagcccattcctcagagctttgcagcggagcttcccgcagtttgaggtagaagccaagcaggtcactgataatgaccatgctaatgccagagcgttttcgcatctggcttcaaaactgatcgaaacggaggtggacccatccgacacgatccttgacattggaagtgcgcccgcccgcagaatgtattctaagcacaagtatcattgtatctgtccgatgagatgtgcggaagatccggacagattgtataagtatgcaactaagctgaagaaaaactgtaaggaaataactgataaggaattggacaagaaaatgaaggagctcgccgccgtcatgagcgaccctgacctggaaactgagactatgtgcctccacgacgacgagtcgtgtcgctacgaagggcaagtcgctgtttaccaggatgtatacgcggttgacggaccgacaagtctctatcaccaagccaataagggagttagagtcgcctactggataggctttgacaccaccccttttatgtttaagaacttggctggagcatatccatcatactctaccaactgggccgacgaaaccgtgttaacggctcgtaacataggcctatgcagctctgacgttatggagcggtcacgtagagggatgtccattcttagaaagaagtatttgaaaccatccaacaatgttctattctctgttggctcgaccatctaccacgagaagagggacttactgaggagctggcacctgccgtctgtatttcacttacgtggcaagcaaaattacacatgtcggtgtgagactatagttagttgcgacgggtacgtcgttaaaagaatagctatcagtccaggcctgtatgggaagccttcaggctatgctgctacgatgcaccgcgagggattcttgtgctgcaaagtgacagacacattgaacggggagagggtctcttttcccgtgtgcacgtatgtgccagctacattgtgtgaccaaatgactggcatactggcaacagatgtcagtgcggacgacgcgcaaaaactgctggttgggctcaaccagcgtatagtcgtcaacggtcgcacccagagaaacaccaataccatgaaaaattaccttttgcccgtagtggcccaggcatttgctaggtgggcaaaggaatataaggaagatcaagaagatgaaaggccactaggactacgagatagacagttagtcatggggtgttgttgggcttttagaaggcacaagataacatctatttataagcgcccggatacccaaaccatcatcaaagtgaacagcgatttccactcattcgtgctgcccaggataggcagtaacacattggagatcgggctgagaacaagaatcaggaaaatgttagaggagcacaaggagccgtcacctctcattaccgccgaggacgtacaagaagctaagtgcgcagccgatgaggctaaggaggtgcgtgaagccgaggagttgcgcgcagctctaccacctttggcagctgatgttgaggagcccactctggaagccgatgtcgacttgatgttacaagaggctggggccggctcagtggagacacctcgtggcttgataaaggttaccagctacgatggcgaggacaagatcggctcttacgctgtgctttctccgcaggctgtactcaagagtgaaaaattatcttgcatccaccctctcgctgaacaagtcatagtgataacacactctggccgaaaagggcgttatgccgtggaaccataccatggtaaagtagtggtgccagagggacatgcaatacccgtccaggactttcaagctctgagtgaaagtgccaccattgtgtacaacgaacgtgagttcgtaaacaggtacctgcaccatattgccacacatggaggagcgctgaacactgatgaagaatattacaaaactgtcaagcccagcgagcacgacggcgaatacctgtacgacatcgacaggaaacagtgcgtcaagaaagaactagtcactgggctagggctcacaggcgagctggtggatcctcccttccatgaattcgcctacgagagtctgagaacacgaccagccgctccttaccaagtaccaaccataggggtgtatggcgtgccaggatcaggcaagtctggcatcattaaaagcgcagtcaccaaaaaagatctagtggtgagcgccaagaaagaaaactgtgcagaaattataagggacgtcaagaaaatgaaagggctggacgtcaatgccagaactgtggactcagtgctcttgaatggatgcaaacaccccgtagagaccctgtatattgacgaagcttttgcttgtcatgcaggtactctcagagcgctcatagccattataagacctaaaaaggcagtgctctgcggggatcccaaacagtgcggtttttttaacatgatgtgcctgaaagtgcattttaaccacgagatttgcacacaagtcttccacaaaagcatctctcgccgttgcactaaatctgtgacttcggtcgtctcaaccttgttttacgacaaaaaaatgagaacgacgaatccgaaagagactaagattgtgattgacactaccggcagtaccaaacctaagcaggacgatctcattctcacttgtttcagagggtgggtgaagcagttgcaaatagattacaaaggcaacgaaataatgacggcagctgcctctcaagggctgacccgtaaaggtgtgtatgccgttcggtacaaggtgaatgaaaatcctctgtacgcacccacctcagaacatgtgaacgtcctactgacccgcacggaggaccgcatcgtgtggaaaacactagccggcgacccatggataaaaacactgactgccaagtaccctgggaatttcactgccacgatagaggagtggcaagcagagcatgatgccatcatgaggcacatcttggagagaccggaccctaccgacgtcttccagaataaggcaaacgtgtgttgggccaaggctttagtgccggtgctgaagaccgctggcatagacatgaccactgaacaatggaacactgtggattattttgaaacggacaaagctcactcagcagagatagtattgaaccaactatgcgtgaggttctttggactcgatctggactccggtctattttctgcacccactgttccgttatccattaggaataatcactgggataactccccgtcgcctaacatgtacgggctgaataaagaagtggtccgtcagctctctcgcaggtacccacaactgcctcgggcagttgccactggaagagtctatgacatgaacactggtacactgcgcaattatgatccgcgcataaacctagtacctgtaaacagaagactgcctcatgctttagtcctccaccataatgaacacccacagagtgacttttcttcattcgtcagcaaattgaagggcagaactgtcctggtggtcggggaaaagttgtccgtcccaggcaaaatggttgactggttgtcagaccggcctgaggctaccttcagagctcggctggatttaggcatcccaggtgatgtgcccaaatatgacataatatttgttaatgtgaggaccccatataaataccatcactatcagcagtgtgaagaccatgccattaagcttagcatgttgaccaagaaagcttgtctgcatctgaatcccggcggaacctgtgtcagcataggttatggttacgctgacagggccagcgaaagcatcattggtgctatagcgcggcagttcaagttttcccgggtatgcaaaccgaaatcctcacttgaagagacggaagttctgtttgtattcattgggtacgatcgcaaggcccgtacgcacaatccttacaagctttcatcaaccttgaccaacatttatacaggttccagactccacgaagccggatgtgcaccctcatatcatgtggtgcgaggggatattgccacggccaccgaaggagtgattataaatgctgctaacagcaaaggacaacctggcggaggggtgtgcggagcgctgtataagaaattcccggaaagcttcgatttacagccgatcgaagtaggaaaagcgcgactggtcaaaggtgcagctaaacatatcattcatgccgtaggaccaaacttcaacaaagtttcggaggttgaaggtgacaaacagttggcagaggcttatgagtccatcgctaagattgtcaacgataacaattacaagtcagtagcgattccactgttgtccaccggcatcttttccgggaacaaagatcgactaacccaatcattgaaccatttgctgacagctttagacaccactgatgcagatgtagccatatactgcagggacaagaaatgggaaatgactctcaaggaagcagtggctaggagagaagcagtggaggagatatgcatatccgacgactcttcagtgacagaacctgatgcagagctggtgagggtgcatccgaagagttctttggctggaaggaagggctacagcacaagcgatggcaaaactttctcatatttggaagggaccaagtttcaccaggcggccaaggatatagcagaaattaatgccatgtggcccgttgcaacggaggccaatgagcaggtatgcatgtatatcctcggagaaagcatgagcagtattaggtcgaaatgccccgtcgaagagtcggaagcctccacaccacctagcacgctgccttgcttgtgcatccatgccatgactccagaaagagtacagcgcctaaaagcctcacgtccagaacaaattactgtgtgctcatcctttccattgccgaagtatagaatcactggtgtgcagaagatccaatgctcccagcctatattgttctcaccgaaagtgcctgcgtatattcatccaaggaagtatctcgtggaaacaccaccggtagacgagactccggagccatcggcagagaaccaatccacagaggggacacctgaacaaccaccacttataaccgaggatgagaccaggactagaacgcctgagccgatcatcatcgaagaggaagaagaggatagcataagtttgctgtcagatggcccgacccaccaggtgctgcaagtcgaggcagacattcacgggccgccctctgtatctagctcatcctggtccattcctcatgcatccgactttgatgtggacagtttatccatacttgacaccctggagggagctagcgtgaccagcggggcaacgtcagccgagactaactcttacttcgcaaagagtatggagtttctggcgcgaccggtgcctgcgcctcgaacagtattcaggaaccctccacatcccgctccgcgcacaagaacaccgtcacttgcacccagcagggcctgctcgagaaccagcctagtttccaccccgccaggcgtgaatagggtgatcactagagaggagctcgaggcgcttaccccgtcacgcactcctagcaggtcggtctcgagaaccagcctggtctccaacccgccaggcgtaaatagggtgattacaagagaggagtttgaggcgttcgtagcacaacaacaatgacggtttgatgcgggtgcatacatcttttcctccgacaccggtcaagggcatttacaacaaaaatcagtaaggcaaacggtgctatccgaagtggtgttggagaggaccgaattggagatttcgtatgccccgcgcctcgaccaagaaaaagaagaattactacgcaagaaattacagttaaatcccacacctgctaacagaagcagataccagtccaggaaggtggagaacatgaaagccataacagctagacgtattctgcaaggcctagggcattatttgaaggcagaaggaaaagtggagtgctaccgaaccctgcatcctgttcctttgtattcatctagtgtgaaccgtgccttttcaagccccaaggtcgcagtggaagcctgtaacgccatgttgaaagagaactttccgactgtggcttcttactgtattattccagagtacgatgcctatttggacatggttgacggagcttcatgctgcttagacactgccagtttttgccctgcaaagctgcgcagctttccaaagaaacactcctatttggaacccacaatacgatcggcagtgccttcagcgatccagaacacgctccagaacgtcctggcagctgccacaaaaagaaattgcaatgtcacgcaaatgagagaattgcccgtattggattcggcggcctttaatgtggaatgcttcaagaaatatgcgtgtaataatgaatattgggaaacgtttaaagaaaaccccatcaggcttactgaagaaaacgtggtaaattacattaccaaattaaaaggaccaaaagctgctgctctttttgcgaagacacataatttgaatatgttgcaggacataccaatggacaggtttgtaatggacttaaagagagacgtgaaagtgactccaggaacaaaacatactgaagaacggcccaaggtacaggtgatccaggctgccgatccgctagcaacagcgtatctgtgcggaatccaccgagagctggttaggagattaaatgcggtcctgcttccgaacattcatacactgtttgatatgtcggctgaagactttgacgctattatagccgagcacttccagcctggggattgtgttctggaaactgacatcgcgtcgtttgataaaagtgaggacgacgccatggctctgaccgcgttaatgattctggaagacttaggtgtggacgcagagctgttgacgctgattgaggcggctttcggcgaaatttcatcaatacatttgcccactaaaactaaatttaaattcggagccatgatgaaatctggaatgttcctcacactgtttgtgaacacagtcattaacattgtaatcgcaagcagagtgttgagagaacggctaaccggatcaccatgtgcagcattcattggagatgacaatatcgtgaaaggagtcaaatcggacaaattaatggcagacaggtgcgccacctggttgaatatggaagtcaagattatagatgctgtggtgggcgagaaagcgccttatttctgtggagggtttattttgtgtgactccgtgaccggcacagcgtgccgtgtggcagaccccctaaaaaggctgtttaagcttggcaaacctctggcagcagacgatgaacatgatgatgacaggagaagggcattgcatgaagagtcaacacgctggaaccgagtgggtattctttcagagctgtgcaaggcagtagaatcaaggtatgaaaccgtaggaacttccatcatagttatggccatgactactctagctagcagtgttaaatcattcagctacctgagaggggcccctataactctctacggctaacctgaatggactacgacatagtctagtccgccaagatgttcccgttccagccaatgtatccgatgcagccaatgccctatcgcaacccgttcgcggccccgcgcaggccctggttccccagaaccgacccttttctggcgatgcaggtgcaggaattaacccgctcgatggctaacctgacgttcaagcaacgccgggacgcgccacctgaggggccatccgctaagaaaccgaagaaggaggcctcgcaaaaacagaaagggggaggccaagggaagaagaagaagaaccaagggaagaagaaggctaagacagggccgcctaatccgaaggcacagaatggaaacaagaagaagaccaacaagaaaccaggcaagagacagcgcatggtcatgaaattggaatctgacaagacgttcccaatcatgttggaagggaagataaacggctacgcttgtgtggtcggagggaagttattcaggccgatgcatgtggaaggcaagatcgacaacgacgttctggccgcgcttaagacgaagaaagcatccaaatacgatcttgagtatgcagatgtgccacagaacatgcgggccgatacattcaaatacacccatgagaaaccccaaggctattacagctggcatcatggagcagtccaatatgaaaatgggcgtttcacggtgccgaaaggagttggggccaagggagacagcggacgacccattctggataaccagggacgggtggtcgctattgtgctgggaggtgtgaatgaaggatctaggacagccctttcagtcgtcatgtggaacgagaagggagttaccgtgaagtatactccggagaactgcgagcaatggtcactagtgaccaccatgtgtctgctcgccaatgtgacgttcccatgtgctcaaccaccaatttgctacgacagaaaaccagcagagactttggccatgctcagcgttaacgttgacaacccgggctacgatgagctgctggaagcagctgttaagtgccccggaaggaaaaggagatccaccgaggagctgtttaatgagtataagctaacgcgcccttacatggccagatgcatcagatgtgcagttgggagctgccatagtccaatagcaatcgaggcagtaaagagcgacgggcacgacggttatgttagacttcagacttcctcgcagtatggcctggattcctccggcaacttaaagggcaggaccatgcggtatgacatgcacgggaccattaaagagataccactacatcaagtgtcactctatacatctcgcccgtgtcacattgtggatgggcacggttatttcctgcttgccaggtgcccggcaggggactccatcaccatggaatttaagaaagattccgtcagacactcctgctcggtgccgtatgaagtgaaatttaatcctgtaggcagagaactctatactcatcccccagaacacggagtagagcaagcgtgccaagtctacgcacatgatgcacagaacagaggagcttatgtcgagatgcacctcccgggctcagaagtggacagcagtttggtttccttgagcggcagttcagtcaccgtgacacctcctgatgggactagcgccctggtggaatgcgagtgtggcggcacaaagatctccgagaccatcaacaagacaaaacagttcagccagtgcacaaagaaggagcagtgcagagcatatcggctgcagaacgataagtgggtgtataattctgacaaactgcccaaagcagcgggagccaccttaaaaggaaaactgcatgtcccattcttgctggcagacggcaaatgcaccgtgcctctagcaccagaacctatgataaccttcggtttcagatcagtgtcactgaaactgcaccctaagaatcccacatatctaatcacccgccaacttgctgatgagcctcactacacgcacgagctcatatctgaaccagctgttaggaattttaccgtcaccgaaaaagggtgggagtttgtatggggaaaccacccgccgaaaaggttttgggcacaggaaacagcacccggaaatccacatgggctaccgcacgaggtgataactcattattaccacagataccctatgtccaccatcctgggtttgtcaatttgtgccgccattgcaaccgtttccgttgcagcgtctacctggctgttttgcagatctagagttgcgtgcctaactccttaccggctaacacctaacgctaggataccattttgtctggctgtgctttgctgcgcccgcactgcccgggccgagaccacctgggagtccttggatcacctatggaacaataaccaacagatgttctggattcaattgctgatccctctggccgccttgatcgtagtgactcgcctgctcaggtgcgtgtgctgtgtcgtgccttttttagtcatggccggcgccgcaggcgccggcgcctacgagcacgcgaccacgatgccgagccaagcgggaatctcgtataacactatagtcaacagagcaggctacgcaccactccctatcagcataacaccaacaaagatcaagctgatacctacagtgaacttggagtacgtcacctgccactacaaaacaggaatggattcaccagccatcaaatgctgcggatctcaggaatgcactccaacttacaggcctgatgaacagtgcaaagtcttcacaggggtttacccgttcatgtggggtggtgcatattgcttttgcgacactgagaacacccaagtcagcaaggcctacgtaatgaaatctgacgactgccttgcggatcatgctgaagcatataaagcgcacacagcctcagtgcaggcgttcctcaacatcacagtgggagaacactctattgtgactaccgtgtatgtgaatggagaaactcctgtgaatttcaatggggtcaaaataactgcaggtccgctttccacagcttggacaccctttgatcgcaaaatcgtgcagtatgccggggagatctataattatgattttcctgagtatggggcaggacaaccaggagcatttggagatatacaatccagaacagtctcaagctctgatctgtatgccaataccaacctagtgctgcagagacccaaagcaggagcgatccacgtgccatacactcaggcaccttcgggttttgagcaatggaagaaagataaagctccatcattgaaatttaccgcccctttcggatgcgaaatatatacaaaccccattcgcgccgaaaactgtgctgtagggtcaattccattagcctttgacattcccgacgccttgttcaccagggtgtcagaaacaccgacactttcagcggccgaatgcactcttaacgagtgcgtgtattcttccgactttggtgggatcgccacggtcaagtactcggccagcaagtcaggcaagtgcgcagtccatgtgccatcagggactgctaccctaaaagaagcagcagtcgagctaaccgagcaagggtcggcgactatccatttctcgaccgcaaatatccacccggagttcaggctccaaatatgcacatcatatgttacgtgcaaaggtgattgtcaccccccgaaagaccatattgtgacacaccctcagtatcacgcccaaacatttacagccgcggtgtcaaaaaccgcgtggacgtggttaacatccctgctgggaggatcagccgtaattattataattggcttggtgctggctactattgtggccatgtacgtgctgaccaaccagaaacataattgaatacagcagcaattggcaagctgcttacatagaactcgcggcgattggcatgccgccttaaaatttttattttatttttcttttcttttccgaatcggattttgtttttaatatttc

SEQ ID NO: 6 - DNA, 7895 bp, Venezuelan equine encephalitis virus
  source 1..7895: mol_type = other DNA
atgggcggcgcatgagagaagcccagaccaattacctacccaaaatggagaaagttcacgttgacatcgaggaagacagcccattcctcagagctttgcagcggagcttcccgcagtttgaggtagaagccaagcaggtcactgataatgaccatgctaatgccagagcgttttcgcatctggcttcaaaactgatcgaaacggaggtggacccatccgacacgatccttgacattggaagtgcgcccgcccgcagaatgtattctaagcacaagtatcattgtatctgtccgatgagatgtgcggaagatccggacagattgtataagtatgcaactaagctgaagaaaaactgtaaggaaataactgataaggaattggacaagaaaatgaaggagctcgccgccgtcatgagcgaccctgacctggaaactgagactatgtgcctccacgacgacgagtcgtgtcgctacgaagggcaagtcgctgtttaccaggatgtatacgcggttgacggaccgacaagtctctatcaccaagccaataagggagttagagtcgcctactggataggctttgacaccaccccttttatgtttaagaacttggctggagcatatccatcatactctaccaactgggccgacgaaaccgtgttaacggctcgtaacataggcctatgcagctctgacgttatggagcggtcacgtagagggatgtccattcttagaaagaagtatttgaaaccatccaacaatgttctattctctgttggctcgaccatctaccacgagaagagggacttactgaggagctggcacctgccgtctgtatttcacttacgtggcaagcaaaattacacatgtcggtgtgagactatagttagttgcgacgggtacgtcgttaaaagaatagctatcagtccaggcctgtatgggaagccttcaggctatgctgctacgatgcaccgcgagggattcttgtgctgcaaagtgacagacacattgaacggggagagggtctcttttcccgtgtgcacgtatgtgccagctacattgtgtgaccaaatgactggcatactggcaacagatgtcagtgcggacgacgcgcaaaaactgctggttgggctcaaccagcgtatagtcgtcaacggtcgcacccagagaaacaccaataccatgaaaaattaccttttgcccgtagtggcccaggcatttgctaggtgggcaaaggaatataaggaagatcaagaagatgaaaggccactaggactacgagatagacagttagtcatggggtgttgttgggcttttagaaggcacaagataacatctatttataagcgcccggatacccaaaccatcatcaaagtgaacagcgatttccactcattcgtgctgcccaggataggcagtaacacattggagatcgggctgagaacaagaatcaggaaaatgttagaggagcacaaggagccgtcacctctcattaccgccgaggacgtacaagaagctaagtgcgcagccgatgaggctaaggaggtgcgtgaagccgaggagttgcgcgcagctctaccacctttggcagctgatgttgaggagcccactctggaagccgatgtcgacttgatgttacaagaggctggggccggctcagtggagacacctcgtggcttgataaaggttaccagctacgctggcgaggacaagatcggctcttacgctgtgctttctccgcaggctgtactcaagagtgaaaaattatcttgcatccaccctctcgctgaacaagtcatagtgataacacactctggccgaaaagggcgttatgccgtggaaccataccatggtaaagtagtggtgccagagggacatgcaatacccgtccaggactttcaagctctgagtgaaagtgccaccattgtgtacaacgaacgtgagttcgtaaacaggtacctgcaccatattgccacacatggaggagcgctgaacactgatgaagaatattacaaaactgtcaagcccagcgagcacgacggcgaatacctgtacgacatcgacaggaaacagtgcgtcaagaaagaactagtcactgggctagggctcacaggcgagctggtggatcctcccttccatgaattcgcctacgagagtctgagaacacgaccagccgctccttaccaagtaccaaccataggggtgtatggcgtgccaggatcaggcaagtctggcatcattaaaagcgcagtcaccaaaaaagatctagtggtgagcgccaagaaagaaaactgtgcagaaattataagggacgtcaagaaaatgaaagggctggacgtcaatgccagaactgtggactcagtgctcttgaatggatgcaaacaccccgtagagaccctgtatattgacgaagcttttgcttgtcatgcaggtactctcagagcgctcatagccattataagacctaaaaaggcagtgctctgcggggatcccaaacagtgcggtttttttaacatgatgtgcctgaaagtgcattttaaccacgagatttgcacacaagtcttccacaaaagcatctctcgccgttgcactaaatctgtgacttcggtcgtctcaaccttgttttacgacaaaaaaatgagaacgacgaatccgaaagagactaagattgtgattgacactaccggcagtaccaaacctaagcaggacgatctcattctcacttgtttcagagggtgggtgaagcagttgcaaatagattacaaaggcaacgaaataatgacggcagctgcctctcaagggctgacccgtaaaggtgtgtatgccgttcggtacaaggtgaatgaaaatcctctgtacgcacccacctcagaacatgtgaacgtcctactgacccgcacggaggaccgcatcgtgtggaaaacactagccggcgacccatggataaaaacactgactgccaagtaccctgggaatttcactgccacgatagaggagtggcaagcagagcatgatgccatcatgaggcacatcttggagagaccggaccctaccgacgtcttccagaataaggcaaacgtgtgttgggccaaggctttagtgccggtgctgaagaccgctggcatagacatgaccactgaacaatggaacactgtggattattttgaaacggacaaagctcactcagcagagatagtattgaaccaactatgcgtgaggttctttggactcgatctggactccggtctattttctgcacccactgttccgttatccattaggaataatcactgggataactccccgtcgcctaacatgtacgggctgaataaagaagtggtccgtcagctctctcgcaggtacccacaactgcctcgggcagttgccactggaagagtctatgacatgaacactggtacactgcgcaattatgatccgcgcataaacctagtacctgtaaacagaagactgcctcatgctttagtcctccaccataatgaacacccacagagtgacttttcttcattcgtcagcaaattgaagggcagaactgtcctggtggtcggggaaaagttgtccgtcccaggcaaaatggttgactggttgtcagaccggcctgaggctaccttcagagctcggctggatttaggcatcccaggtgatgtgcccaaatatgacataatatttgttaatgtgaggaccccatataaataccatcactatcagcagtgtgaagaccatgccattaagcttagcatgttgaccaagaaagcttgtctgcatctgaatcccggcggaacctgtgtcagcataggttatggttacgctgacagggccagcgaaagcatcattggtgctatagcgcggcagttcaagttttcccgggtatgcaaaccgaaatcctcacttgaagagacggaagttctgtttgtattcattgggtacgatcgcaaggcccgtacgcacaatccttacaagctttcatcaaccttgaccaacatttatacaggttccagactccacgaagccggatgtgcaccctcatatcatgtggtgcgaggggatattgccacggccaccgaaggagtgattataaatgctgctaacagcaaaggacaacctggcggaggggtgtgcggagcgctgtataagaaattcccggaaagcttcgatttacagccgatcgaagtaggaaaagcgcgactggtcaaaggtgcagctaaacatatcattcatgccgtaggaccaaacttcaacaaagtttcggaggttgaaggtgacaaacagttggcagaggcttatgagtccatcgctaagattgtcaacgataacaattacaagtcagtagcgattccactgttgtccaccggcatcttttccgggaacaaagatcgactaacccaatcattgaaccatttgctgacagctttagacaccactgatgcagatgtagccatatactgcagggacaagaaatgggaaatgactctcaaggaagcagtggctaggagagaagcagtggaggagatatgcatatccgacgactcttcagtgacagaacctgatgcagagctggtgagggtgcatccgaagagttctttggctggaaggaagggctacagcacaagcgatggcaaaactttctcatatttggaagggaccaagtttcaccaggcggccaaggatatagcagaaattaatgccatgtggcccgttgcaacggaggccaatgagcaggtatgcatgtatatcctcggagaaagcatgagcagtattaggtcgaaatgccccgtcgaagagtcggaagcctccacaccacctagcacgctgccttgcttgtgcatccatgccatgactccagaaagagtacagcgcctaaaagcctcacgtccagaacaaattactgtgtgctcatcctttccattgccgaagtatagaatcactggtgtgcagaagatccaatgctcccagcctatattgttctcaccgaaagtgcctgcgtatattcatccaaggaagtatctcgtggaaacaccaccggtagacgagactccggagccatcggcagagaaccaatccacagaggggacacctgaacaaccaccacttataaccgaggatgagaccaggactagaacgcctgagccgatcatcatcgaagaggaagaagaggatagcataagtttgctgtcagatggcccgacccaccaggtgctgcaagtcgaggcagacattcacgggccgccctctgtatctagctcatcctggtccattcctcatgcatccgactttgatgtggacagtttatccatacttgacaccctggagggagctagcgtgaccagcggggcaacgtcagccgagactaactcttacttcgcaaagagtatggagtttctggcgcgaccggtgcctgcgcctcgaacagtattcaggaaccctccacatcccgctccgcgcacaagaacaccgtcacttgcacccagcagggcctgctcgagaaccagcctagtttccaccccgccaggcgtgaatagggtgatcactagagaggagctcgaggcgcttaccccgtcacgcactcctagcaggtcggtctcgagaaccagcctggtctccaacccgccaggcgtaaatagggtgattacaagagaggagtttgaggcgttcgtagcacaacaacaatgacggtttgatgcgggtgcatacatcttttcctccgacaccggtcaagggcatttacaacaaaaatcagtaaggcaaacggtgctatccgaagtggtgttggagaggaccgaattggagatttcgtatgccccgcgcctcgaccaagaaaaagaagaattactacgcaagaaattacagttaaatcccacacctgctaacagaagcagataccagtccaggaaggtggagaacatgaaagccataacagctagacgtattctgcaaggcctagggcattatttgaaggcagaaggaaaagtggagtgctaccgaaccctgcatcctgttcctttgtattcatctagtgtgaaccgtgccttttcaagccccaaggtcgcagtggaagcctgtaacgccatgttgaaagagaactttccgactgtggcttcttactgtattattccagagtacgatgcctatttggacatggttgacggagcttcatgctgcttagacactgccagtttttgccctgcaaagctgcgcagctttccaaagaaacactcctatttggaacccacaatacgatcggcagtgccttcagcgatccagaacacgctccagaacgtcctggcagctgccacaaaaagaaattgcaatgtcacgcaaatgagagaattgcccgtattggattcggcggcctttaatgtggaatgcttcaagaaatatgcgtgtaataatgaatattgggaaacgtttaaagaaaaccccatcaggcttactgaagaaaacgtggtaaattacattaccaaattaaaaggaccaaaagctgctgctctttttgcgaagacacataatttgaatatgttgcaggacataccaatggacaggtttgtaatggacttaaagagagacgtgaaagtgactccaggaacaaaacatactgaagaacggcccaaggtacaggtgatccaggctgccgatccgctagcaacagcgtatctgtgcggaatccaccgagagctggttaggagattaaatgcggtcctgcttccgaacattcatacactgtttgatatgtcggctgaagactttgacgctattatagccgagcacttccagcctggggattgtgttctggaaactgacatcgcgtcgtttgataaaagtgaggacgacgccatggctctgaccgcgttaatgattctggaagacttaggtgtggacgcagagctgttgacgctgattgaggcggctttcggcgaaatttcatcaatacatttgcccactaaaactaaatttaaattcggagccatgatgaaatctggaatgttcctcacactgtttgtgaacacagtcattaacattgtaatcgcaagcagagtgttgagagaacggctaaccggatcaccatgtgcagcattcattggagatgacaatatcgtgaaaggagtcaaatcggacaaattaatggcagacaggtgcgccacctggttgaatatggaagtcaagattatagatgctgtggtgggcgagaaagcgccttatttctgtggagggtttattttgtgtgactccgtgaccggcacagcgtgccgtgtggcagaccccctaaaaaggctgtttaagcttggcaaacctctggcagcagacgatgaacatgatgatgacaggagaagggcattgcatgaagagtcaacacgctggaaccgagtgggtattctttcagagctgtgcaaggcagtagaatcaaggtatgaaaccgtaggaacttccatcatagttatggccatgactactctagctagcagtgttaaatcattcagctacctgagaggggcccctataactctctacggctaacctgaatggactacgacgtatcacgcccaaacatttacagccgcggtgtcaaaaaccgcgtggacgtggttaacatccctgctgggaggatcagccgtaattattataattggcttggtgctggctactattgtggccatgtacgtgctgaccaaccagaaacataattgaatacagcagcaattggcaagctgcttacatagaactcgcggcgattggcatgccgccttaaaatttttattttattttttcttttcttttccgaatcggattttgtttttaatatttcaaaaaaaaaaaaaaaaaaaaaaaaaaaaaaaaaaaaaaaaaaaaaaaaaaaaaaaaaaaaaaaaaaaaaaaaaaaaaaaa

SEQ ID NO: 7 - DNA, 11446 bp, Venezuelan equine encephalitis virus
  source 1..11446: mol_type = other DNA
ataggcggcgcatgagagaagcccagaccaattacctacccaaaatggagaaagttcacgttgacatcgaggaagacagcccattcctcagagctttgcagcggagcttcccgcagtttgaggtagaagccaagcaggtcactgataatgaccatgctaatgccagagcgttttcgcatctggcttcaaaactgatcgaaacggaggtggacccatccgacacgatccttgacattggaagtgcgcccgcccgcagaatgtattctaagcacaagtatcattgtatctgtccgatgagatgtgcggaagatccggacagattgtataagtatgcaactaagctgaagaaaaactgtaaggaaataactgataaggaattggacaagaaaatgaaggagctcgccgccgtcatgagcgaccctgacctggaaactgagactatgtgcctccacgacgacgagtcgtgtcgctacgaagggcaagtcgctgtttaccaggatgtatacgcggttgacggaccgacaagtctctatcaccaagccaataagggagttagagtcgcctactggataggctttgacaccaccccttttatgtttaagaacttggctggagcatatccatcatactctaccaactgggccgacgaaaccgtgttaacggctcgtaacataggcctatgcagctctgacgttatggagcggtcacgtagagggatgtccattcttagaaagaagtatttgaaaccatccaacaatgttctattctctgttggctcgaccatctaccacgagaagagggacttactgaggagctggcacctgccgtctgtatttcacttacgtggcaagcaaaattacacatgtcggtgtgagactatagttagttgcgacgggtacgtcgttaaaagaatagctatcagtccaggcctgtatgggaagccttcaggctatgctgctacgatgcaccgcgagggattcttgtgctgcaaagtgacagacacattgaacggggagagggtctcttttcccgtgtgcacgtatgtgccagctacattgtgtgaccaaatgactggcatactggcaacagatgtcagtgcggacgacgcgcaaaaactgctggttgggctcaaccagcgtatagtcgtcaacggtcgcacccagagaaacaccaataccatgaaaaattaccttttgcccgtagtggcccaggcatttgctaggtgggcaaaggaatataaggaagatcaagaagatgaaaggccactaggactacgagatagacagttagtcatggggtgttgttgggcttttagaaggcacaagataacatctatttataagcgcccggatacccaaaccatcatcaaagtgaacagcgatttccactcattcgtgctgcccaggataggcagtaacacattggagatcgggctgagaacaagaatcaggaaaatgttagaggagcacaaggagccgtcacctctcattaccgccgaggacgtacaagaagctaagtgcgcagccgatgaggctaaggaggtgcgtgaagccgaggagttgcgcgcagctctaccacctttggcagctgatgttgaggagcccactctggaagccgatgtcgacttgatgttacaagaggctggggccggctcagtggagacacctcgtggcttgataaaggttaccagctacgatggcgaggacaagatcggctcttacgctgtgctttctccgcaggctgtactcaagagtgaaaaattatcttgcatccaccctctcgctgaacaagtcatagtgataacacactctggccgaaaagggcgttatgccgtggaaccataccatggtaaagtagtggtgccagagggacatgcaatacccgtccaggactttcaagctctgagtgaaagtgccaccattgtgtacaacgaacgtgagttcgtaaacaggtacctgcaccatattgccacacatggaggagcgctgaacactgatgaagaatattacaaaactgtcaagcccagcgagcacgacggcgaatacctgtacgacatcgacaggaaacagtgcgtcaagaaagaactagtcactgggctagggctcacaggcgagctggtggatcctcccttccatgaattcgcctacgagagtctgagaacacgaccagccgctccttaccaagtaccaaccataggggtgtatggcgtgccaggatcaggcaagtctggcatcattaaaagcgcagtcaccaaaaaagatctagtggtgagcgccaagaaagaaaactgtgcagaaattataagggacgtcaagaaaatgaaagggctggacgtcaatgccagaactgtggactcagtgctcttgaatggatgcaaacaccccgtagagaccctgtatattgacgaagcttttgcttgtcatgcaggtactctcagagcgctcatagccattataagacctaaaaaggcagtgctctgcggggatcccaaacagtgcggtttttttaacatgatgtgcctgaaagtgcattttaaccacgagatttgcacacaagtcttccacaaaagcatctctcgccgttgcactaaatctgtgacttcggtcgtctcaaccttgttttacgacaaaaaaatgagaacgacgaatccgaaagagactaagattgtgattgacactaccggcagtaccaaacctaagcaggacgatctcattctcacttgtttcagagggtgggtgaagcagttgcaaatagattacaaaggcaacgaaataatgacggcagctgcctctcaagggctgacccgtaaaggtgtgtatgccgttcggtacaaggtgaatgaaaatcctctgtacgcacccacctcagaacatgtgaacgtcctactgacccgcacggaggaccgcatcgtgtggaaaacactagccggcgacccatggataaaaacactgactgccaagtaccctgggaatttcactgccacgatagaggagtggcaagcagagcatgatgccatcatgaggcacatcttggagagaccggaccctaccgacgtcttccagaataaggcaaacgtgtgttgggccaaggctttagtgccggtgctgaagaccgctggcatagacatgaccactgaacaatggaacactgtggattattttgaaacggacaaagctcactcagcagagatagtattgaaccaactatgcgtgaggttctttggactcgatctggactccggtctattttctgcacccactgttccgttatccattaggaataatcactgggataactccccgtcgcctaacatgtacgggctgaataaagaagtggtccgtcagctctctcgcaggtacccacaactgcctcgggcagttgccactggaagagtctatgacatgaacactggtacactgcgcaattatgatccgcgcataaacctagtacctgtaaacagaagactgcctcatgctttagtcctccaccataatgaacacccacagagtgacttttcttcattcgtcagcaaattgaagggcagaactgtcctggtggtcggggaaaagttgtccgtcccaggcaaaatggttgactggttgtcagaccggcctgaggctaccttcagagctcggctggatttaggcatcccaggtgatgtgcccaaatatgacataatatttgttaatgtgaggaccccatataaataccatcactatcagcagtgtgaagaccatgccattaagcttagcatgttgaccaagaaagcttgtctgcatctgaatcccggcggaacctgtgtcagcataggttatggttacgctgacagggccagcgaaagcatcattggtgctatagcgcggcagttcaagttttcccgggtatgcaaaccgaaatcctcacttgaagagacggaagttctgtttgtattcattgggtacgatcgcaaggcccgtacgcacaatccttacaagctttcatcaaccttgaccaacatttatacaggttccagactccacgaagccggatgtgcaccctcatatcatgtggtgcgaggggatattgccacggccaccgaaggagtgattataaatgctgctaacagcaaaggacaacctggcggaggggtgtgcggagcgctgtataagaaattcccggaaagcttcgatttacagccgatcgaagtaggaaaagcgcgactggtcaaaggtgcagctaaacatatcattcatgccgtaggaccaaacttcaacaaagtttcggaggttgaaggtgacaaacagttggcagaggcttatgagtccatcgctaagattgtcaacgataacaattacaagtcagtagcgattccactgttgtccaccggcatcttttccgggaacaaagatcgactaacccaatcattgaaccatttgctgacagctttagacaccactgatgcagatgtagccatatactgcagggacaagaaatgggaaatgactctcaaggaagcagtggctaggagagaagcagtggaggagatatgcatatccgacgactcttcagtgacagaacctgatgcagagctggtgagggtgcatccgaagagttctttggctggaaggaagggctacagcacaagcgatggcaaaactttctcatatttggaagggaccaagtttcaccaggcggccaaggatatagcagaaattaatgccatgtggcccgttgcaacggaggccaatgagcaggtatgcatgtatatcctcggagaaagcatgagcagtattaggtcgaaatgccccgtcgaagagtcggaagcctccacaccacctagcacgctgccttgcttgtgcatccatgccatgactccagaaagagtacagcgcctaaaagcctcacgtccagaacaaattactgtgtgctcatcctttccattgccgaagtatagaatcactggtgtgcagaagatccaatgctcccagcctatattgttctcaccgaaagtgcctgcgtatattcatccaaggaagtatctcgtggaaacaccaccggtagacgagactccggagccatcggcagagaaccaatccacagaggggacacctgaacaaccaccacttataaccgaggatgagaccaggactagaacgcctgagccgatcatcatcgaagaggaagaagaggatagcataagtttgctgtcagatggcccgacccaccaggtgctgcaagtcgaggcagacattcacgggccgccctctgtatctagctcatcctggtccattcctcatgcatccgactttgatgtggacagtttatccatacttgacaccctggagggagctagcgtgaccagcggggcaacgtcagccgagactaactcttacttcgcaaagagtatggagtttctggcgcgaccggtgcctgcgcctcgaacagtattcaggaaccctccacatcccgctccgcgcacaagaacaccgtcacttgcacccagcagggcctgctcgagaaccagcctagtttccaccccgccaggcgtgaatagggtgatcactagagaggagctcgaggcgcttaccccgtcacgcactcctagcaggtcggtctcgagaaccagcctggtctccaacccgccaggcgtaaatagggtgattacaagagaggagtttgaggcgttcgtagcacaacaacaatgacggtttgatgcgggtgcatacatcttttcctccgacaccggtcaagggcatttacaacaaaaatcagtaaggcaaacggtgctatccgaagtggtgttggagaggaccgaattggagatttcgtatgccccgcgcctcgaccaagaaaaagaagaattactacgcaagaaattacagttaaatcccacacctgctaacagaagcagataccagtccaggaaggtggagaacatgaaagccataacagctagacgtattctgcaaggcctagggcattatttgaaggcagaaggaaaagtggagtgctaccgaaccctgcatcctgttcctttgtattcatctagtgtgaaccgtgccttttcaagccccaaggtcgcagtggaagcctgtaacgccatgttgaaagagaactttccgactgtggcttcttactgtattattccagagtacgatgcctatttggacatggttgacggagcttcatgctgcttagacactgccagtttttgccctgcaaagctgcgcagctttccaaagaaacactcctatttggaacccacaatacgatcggcagtgccttcagcgatccagaacacgctccagaacgtcctggcagctgccacaaaaagaaattgcaatgtcacgcaaatgagagaattgcccgtattggattcggcggcctttaatgtggaatgcttcaagaaatatgcgtgtaataatgaatattgggaaacgtttaaagaaaaccccatcaggcttactgaagaaaacgtggtaaattacattaccaaattaaaaggaccaaaagctgctgctctttttgcgaagacacataatttgaatatgttgcaggacataccaatggacaggtttgtaatggacttaaagagagacgtgaaagtgactccaggaacaaaacatactgaagaacggcccaaggtacaggtgatccaggctgccgatccgctagcaacagcgtatctgtgcggaatccaccgagagctggttaggagattaaatgcggtcctgcttccgaacattcatacactgtttgatatgtcggctgaagactttgacgctattatagccgagcacttccagcctggggattgtgttctggaaactgacatcgcgtcgtttgataaaagtgaggacgacgccatggctctgaccgcgttaatgattctggaagacttaggtgtggacgcagagctgttgacgctgattgaggcggctttcggcgaaatttcatcaatacatttgcccactaaaactaaatttaaattcggagccatgatgaaatctggaatgttcctcacactgtttgtgaacacagtcattaacattgtaatcgcaagcagagtgttgagagaacggctaaccggatcaccatgtgcagcattcattggagatgacaatatcgtgaaaggagtcaaatcggacaaattaatggcagacaggtgcgccacctggttgaatatggaagtcaagattatagatgctgtggtgggcgagaaagcgccttatttctgtggagggtttattttgtgtgactccgtgaccggcacagcgtgccgtgtggcagaccccctaaaaaggctgtttaagcttggcaaacctctggcagcagacgatgaacatgatgatgacaggagaagggcattgcatgaagagtcaacacgctggaaccgagtgggtattctttcagagctgtgcaaggcagtagaatcaaggtatgaaaccgtaggaacttccatcatagttatggccatgactactctagctagcagtgttaaatcattcagctacctgagaggggcccctataactctctacggctaacctgaatggactacgacatagtctagtccgccaagatgttcccgttccagccaatgtatccgatgcagccaatgccctatcgcaacccgttcgcggccccgcgcaggccctggttccccagaaccgacccttttctggcgatgcaggtgcaggaattaacccgctcgatggctaacctgacgttcaagcaacgccgggacgcgccacctgaggggccatccgctaagaaaccgaagaaggaggcctcgcaaaaacagaaagggggaggccaagggaagaagaagaagaaccaagggaagaagaaggctaagacagggccgcctaatccgaaggcacagaatggaaacaagaagaagaccaacaagaaaccaggcaagagacagcgcatggtcatgaaattggaatctgacaagacgttcccaatcatgttggaagggaagataaacggctacgcttgtgtggtcggagggaagttattcaggccgatgcatgtggaaggcaagatcgacaacgacgttctggccgcgcttaagacgaagaaagcatccaaatacgatcttgagtatgcagatgtgccacagaacatgcgggccgatacattcaaatacacccatgagaaaccccaaggctattacagctggcatcatggagcagtccaatatgaaaatgggcgtttcacggtgccgaaaggagttggggccaagggagacagcggacgacccattctggataaccagggacgggtggtcgctattgtgctgggaggtgtgaatgaaggatctaggacagccctttcagtcgtcatgtggaacgagaagggagttaccgtgaagtatactccggagaactgcgagcaatggtcactagtgaccaccatgtgtctgctcgccaatgtgacgttcccatgtgctcaaccaccaatttgctacgacagaaaaccagcagagactttggccatgctcagcgttaacgttgacaacccgggctacgatgagctgctggaagcagctgttaagtgccccggaaggaaaaggagatccaccgaggagctgtttaatgagtataagctaacgcgcccttacatggccagatgcatcagatgtgcagttgggagctgccatagtccaatagcaatcgaggcagtaaagagcgacgggcacgacggttatgttagacttcagacttcctcgcagtatggcctggattcctccggcaacttaaagggcaggaccatgcggtatgacatgcacgggaccattaaagagataccactacatcaagtgtcactctatacatctcgcccgtgtcacattgtggatgggcacggttatttcctgcttgccaggtgcccggcaggggactccatcaccatggaatttaagaaagattccgtcagacactcctgctcggtgccgtatgaagtgaaatttaatcctgtaggcagagaactctatactcatcccccagaacacggagtagagcaagcgtgccaagtctacgcacatgatgcacagaacagaggagcttatgtcgagatgcacctcccgggctcagaagtggacagcagtttggtttccttgagcggcagttcagtcaccgtgacacctcctgatgggactagcgccctggtggaatgcgagtgtggcggcacaaagatctccgagaccatcaacaagacaaaacagttcagccagtgcacaaagaaggagcagtgcagagcatatcggctgcagaacgataagtgggtgtataattctgacaaactgcccaaagcagcgggagccaccttaaaaggaaaactgcatgtcccattcttgctggcagacggcaaatgcaccgtgcctctagcaccagaacctatgataaccttcggtttcagatcagtgtcactgaaactgcaccctaagaatcccacatatctaatcacccgccaacttgctgatgagcctcactacacgcacgagctcatatctgaaccagctgttaggaattttaccgtcaccgaaaaagggtgggagtttgtatggggaaaccacccgccgaaaaggttttgggcacaggaaacagcacccggaaatccacatgggctaccgcacgaggtgataactcattattaccacagataccctatgtccaccatcctgggtttgtcaatttgtgccgccattgcaaccgtttccgttgcagcgtctacctggctgttttgcagatctagagttgcgtgcctaactccttaccggctaacacctaacgctaggataccattttgtctggctgtgctttgctgcgcccgcactgcccgggccgagaccacctgggagtccttggatcacctatggaacaataaccaacagatgttctggattcaattgctgatccctctggccgccttgatcgtagtgactcgcctgctcaggtgcgtgtgctgtgtcgtgccttttttagtcatggccggcgccgcaggcgccggcgcctacgagcacgcgaccacgatgccgagccaagcgggaatctcgtataacactatagtcaacagagcaggctacgcaccactccctatcagcataacaccaacaaagatcaagctgatacctacagtgaacttggagtacgtcacctgccactacaaaacaggaatggattcaccagccatcaaatgctgcggatctcaggaatgcactccaacttacaggcctgatgaacagtgcaaagtcttcacaggggtttacccgttcatgtggggtggtgcatattgcttttgcgacactgagaacacccaagtcagcaaggcctacgtaatgaaatctgacgactgccttgcggatcatgctgaagcatataaagcgcacacagcctcagtgcaggcgttcctcaacatcacagtgggagaacactctattgtgactaccgtgtatgtgaatggagaaactcctgtgaatttcaatggggtcaaaataactgcaggtccgctttccacagcttggacaccctttgatcgcaaaatcgtgcagtatgccggggagatctataattatgattttcctgagtatggggcaggacaaccaggagcatttggagatatacaatccagaacagtctcaagctctgatctgtatgccaataccaacctagtgctgcagagacccaaagcaggagcgatccacgtgccatacactcaggcaccttcgggttttgagcaatggaagaaagataaagctccatcattgaaatttaccgcccctttcggatgcgaaatatatacaaaccccattcgcgccgaaaactgtgctgtagggtcaattccattagcctttgacattcccgacgccttgttcaccagggtgtcagaaacaccgacactttcagcggccgaatgcactcttaacgagtgcgtgtattcttccgactttggtgggatcgccacggtcaagtactcggccagcaagtcaggcaagtgcgcagtccatgtgccatcagggactgctaccctaaaagaagcagcagtcgagctaaccgagcaagggtcggcgactatccatttctcgaccgcaaatatccacccggagttcaggctccaaatatgcacatcatatgttacgtgcaaaggtgattgtcaccccccgaaagaccatattgtgacacaccctcagtatcacgcccaaacatttacagccgcggtgtcaaaaaccgcgtggacgtggttaacatccctgctgggaggatcagccgtaattattataattggcttggtgctggctactattgtggccatgtacgtgctgaccaaccagaaacataattgaatacagcagcaattggcaagctgcttacatagaactcgcggcgattggcatgccgccttaaaatttttattttatttttcttttcttttccgaatcggattttgtttttaatatttc

SEQ ID NO: 8 - DNA, 7914 bp, Venezuelan equine encephalitis virus
  source 1..7914: mol_type = other DNA
taatacgactcactataggatgggcggcgcatgagagaagcccagaccaattacctacccaaaatggagaaagttcacgttgacatcgaggaagacagcccattcctcagagctttgcagcggagcttcccgcagtttgaggtagaagccaagcaggtcactgataatgaccatgctaatgccagagcgttttcgcatctggcttcaaaactgatcgaaacggaggtggacccatccgacacgatccttgacattggaagtgcgcccgcccgcagaatgtattctaagcacaagtatcattgtatctgtccgatgagatgtgcggaagatccggacagattgtataagtatgcaactaagctgaagaaaaactgtaaggaaataactgataaggaattggacaagaaaatgaaggagctcgccgccgtcatgagcgaccctgacctggaaactgagactatgtgcctccacgacgacgagtcgtgtcgctacgaagggcaagtcgctgtttaccaggatgtatacgcggttgacggaccgacaagtctctatcaccaagccaataagggagttagagtcgcctactggataggctttgacaccaccccttttatgtttaagaacttggctggagcatatccatcatactctaccaactgggccgacgaaaccgtgttaacggctcgtaacataggcctatgcagctctgacgttatggagcggtcacgtagagggatgtccattcttagaaagaagtatttgaaaccatccaacaatgttctattctctgttggctcgaccatctaccacgagaagagggacttactgaggagctggcacctgccgtctgtatttcacttacgtggcaagcaaaattacacatgtcggtgtgagactatagttagttgcgacgggtacgtcgttaaaagaatagctatcagtccaggcctgtatgggaagccttcaggctatgctgctacgatgcaccgcgagggattcttgtgctgcaaagtgacagacacattgaacggggagagggtctcttttcccgtgtgcacgtatgtgccagctacattgtgtgaccaaatgactggcatactggcaacagatgtcagtgcggacgacgcgcaaaaactgctggttgggctcaaccagcgtatagtcgtcaacggtcgcacccagagaaacaccaataccatgaaaaattaccttttgcccgtagtggcccaggcatttgctaggtgggcaaaggaatataaggaagatcaagaagatgaaaggccactaggactacgagatagacagttagtcatggggtgttgttgggcttttagaaggcacaagataacatctatttataagcgcccggatacccaaaccatcatcaaagtgaacagcgatttccactcattcgtgctgcccaggataggcagtaacacattggagatcgggctgagaacaagaatcaggaaaatgttagaggagcacaaggagccgtcacctctcattaccgccgaggacgtacaagaagctaagtgcgcagccgatgaggctaaggaggtgcgtgaagccgaggagttgcgcgcagctctaccacctttggcagctgatgttgaggagcccactctggaagccgatgtcgacttgatgttacaagaggctggggccggctcagtggagacacctcgtggcttgataaaggttaccagctacgctggcgaggacaagatcggctcttacgctgtgctttctccgcaggctgtactcaagagtgaaaaattatcttgcatccaccctctcgctgaacaagtcatagtgataacacactctggccgaaaagggcgttatgccgtggaaccataccatggtaaagtagtggtgccagagggacatgcaatacccgtccaggactttcaagctctgagtgaaagtgccaccattgtgtacaacgaacgtgagttcgtaaacaggtacctgcaccatattgccacacatggaggagcgctgaacactgatgaagaatattacaaaactgtcaagcccagcgagcacgacggcgaatacctgtacgacatcgacaggaaacagtgcgtcaagaaagaactagtcactgggctagggctcacaggcgagctggtggatcctcccttccatgaattcgcctacgagagtctgagaacacgaccagccgctccttaccaagtaccaaccataggggtgtatggcgtgccaggatcaggcaagtctggcatcattaaaagcgcagtcaccaaaaaagatctagtggtgagcgccaagaaagaaaactgtgcagaaattataagggacgtcaagaaaatgaaagggctggacgtcaatgccagaactgtggactcagtgctcttgaatggatgcaaacaccccgtagagaccctgtatattgacgaagcttttgcttgtcatgcaggtactctcagagcgctcatagccattataagacctaaaaaggcagtgctctgcggggatcccaaacagtgcggtttttttaacatgatgtgcctgaaagtgcattttaaccacgagatttgcacacaagtcttccacaaaagcatctctcgccgttgcactaaatctgtgacttcggtcgtctcaaccttgttttacgacaaaaaaatgagaacgacgaatccgaaagagactaagattgtgattgacactaccggcagtaccaaacctaagcaggacgatctcattctcacttgtttcagagggtgggtgaagcagttgcaaatagattacaaaggcaacgaaataatgacggcagctgcctctcaagggctgacccgtaaaggtgtgtatgccgttcggtacaaggtgaatgaaaatcctctgtacgcacccacctcagaacatgtgaacgtcctactgacccgcacggaggaccgcatcgtgtggaaaacactagccggcgacccatggataaaaacactgactgccaagtaccctgggaatttcactgccacgatagaggagtggcaagcagagcatgatgccatcatgaggcacatcttggagagaccggaccctaccgacgtcttccagaataaggcaaacgtgtgttgggccaaggctttagtgccggtgctgaagaccgctggcatagacatgaccactgaacaatggaacactgtggattattttgaaacggacaaagctcactcagcagagatagtattgaaccaactatgcgtgaggttctttggactcgatctggactccggtctattttctgcacccactgttccgttatccattaggaataatcactgggataactccccgtcgcctaacatgtacgggctgaataaagaagtggtccgtcagctctctcgcaggtacccacaactgcctcgggcagttgccactggaagagtctatgacatgaacactggtacactgcgcaattatgatccgcgcataaacctagtacctgtaaacagaagactgcctcatgctttagtcctccaccataatgaacacccacagagtgacttttcttcattcgtcagcaaattgaagggcagaactgtcctggtggtcggggaaaagttgtccgtcccaggcaaaatggttgactggttgtcagaccggcctgaggctaccttcagagctcggctggatttaggcatcccaggtgatgtgcccaaatatgacataatatttgttaatgtgaggaccccatataaataccatcactatcagcagtgtgaagaccatgccattaagcttagcatgttgaccaagaaagcttgtctgcatctgaatcccggcggaacctgtgtcagcataggttatggttacgctgacagggccagcgaaagcatcattggtgctatagcgcggcagttcaagttttcccgggtatgcaaaccgaaatcctcacttgaagagacggaagttctgtttgtattcattgggtacgatcgcaaggcccgtacgcacaatccttacaagctttcatcaaccttgaccaacatttatacaggttccagactccacgaagccggatgtgcaccctcatatcatgtggtgcgaggggatattgccacggccaccgaaggagtgattataaatgctgctaacagcaaaggacaacctggcggaggggtgtgcggagcgctgtataagaaattcccggaaagcttcgatttacagccgatcgaagtaggaaaagcgcgactggtcaaaggtgcagctaaacatatcattcatgccgtaggaccaaacttcaacaaagtttcggaggttgaaggtgacaaacagttggcagaggcttatgagtccatcgctaagattgtcaacgataacaattacaagtcagtagcgattccactgttgtccaccggcatcttttccgggaacaaagatcgactaacccaatcattgaaccatttgctgacagctttagacaccactgatgcagatgtagccatatactgcagggacaagaaatgggaaatgactctcaaggaagcagtggctaggagagaagcagtggaggagatatgcatatccgacgactcttcagtgacagaacctgatgcagagctggtgagggtgcatccgaagagttctttggctggaaggaagggctacagcacaagcgatggcaaaactttctcatatttggaagggaccaagtttcaccaggcggccaaggatatagcagaaattaatgccatgtggcccgttgcaacggaggccaatgagcaggtatgcatgtatatcctcggagaaagcatgagcagtattaggtcgaaatgccccgtcgaagagtcggaagcctccacaccacctagcacgctgccttgcttgtgcatccatgccatgactccagaaagagtacagcgcctaaaagcctcacgtccagaacaaattactgtgtgctcatcctttccattgccgaagtatagaatcactggtgtgcagaagatccaatgctcccagcctatattgttctcaccgaaagtgcctgcgtatattcatccaaggaagtatctcgtggaaacaccaccggtagacgagactccggagccatcggcagagaaccaatccacagaggggacacctgaacaaccaccacttataaccgaggatgagaccaggactagaacgcctgagccgatcatcatcgaagaggaagaagaggatagcataagtttgctgtcagatggcccgacccaccaggtgctgcaagtcgaggcagacattcacgggccgccctctgtatctagctcatcctggtccattcctcatgcatccgactttgatgtggacagtttatccatacttgacaccctggagggagctagcgtgaccagcggggcaacgtcagccgagactaactcttacttcgcaaagagtatggagtttctggcgcgaccggtgcctgcgcctcgaacagtattcaggaaccctccacatcccgctccgcgcacaagaacaccgtcacttgcacccagcagggcctgctcgagaaccagcctagtttccaccccgccaggcgtgaatagggtgatcactagagaggagctcgaggcgcttaccccgtcacgcactcctagcaggtcggtctcgagaaccagcctggtctccaacccgccaggcgtaaatagggtgattacaagagaggagtttgaggcgttcgtagcacaacaacaatgacggtttgatgcgggtgcatacatcttttcctccgacaccggtcaagggcatttacaacaaaaatcagtaaggcaaacggtgctatccgaagtggtgttggagaggaccgaattggagatttcgtatgccccgcgcctcgaccaagaaaaagaagaattactacgcaagaaattacagttaaatcccacacctgctaacagaagcagataccagtccaggaaggtggagaacatgaaagccataacagctagacgtattctgcaaggcctagggcattatttgaaggcagaaggaaaagtggagtgctaccgaaccctgcatcctgttcctttgtattcatctagtgtgaaccgtgccttttcaagccccaaggtcgcagtggaagcctgtaacgccatgttgaaagagaactttccgactgtggcttcttactgtattattccagagtacgatgcctatttggacatggttgacggagcttcatgctgcttagacactgccagtttttgccctgcaaagctgcgcagctttccaaagaaacactcctatttggaacccacaatacgatcggcagtgccttcagcgatccagaacacgctccagaacgtcctggcagctgccacaaaaagaaattgcaatgtcacgcaaatgagagaattgcccgtattggattcggcggcctttaatgtggaatgcttcaagaaatatgcgtgtaataatgaatattgggaaacgtttaaagaaaaccccatcaggcttactgaagaaaacgtggtaaattacattaccaaattaaaaggaccaaaagctgctgctctttttgcgaagacacataatttgaatatgttgcaggacataccaatggacaggtttgtaatggacttaaagagagacgtgaaagtgactccaggaacaaaacatactgaagaacggcccaaggtacaggtgatccaggctgccgatccgctagcaacagcgtatctgtgcggaatccaccgagagctggttaggagattaaatgcggtcctgcttccgaacattcatacactgtttgatatgtcggctgaagactttgacgctattatagccgagcacttccagcctggggattgtgttctggaaactgacatcgcgtcgtttgataaaagtgaggacgacgccatggctctgaccgcgttaatgattctggaagacttaggtgtggacgcagagctgttgacgctgattgaggcggctttcggcgaaatttcatcaatacatttgcccactaaaactaaatttaaattcggagccatgatgaaatctggaatgttcctcacactgtttgtgaacacagtcattaacattgtaatcgcaagcagagtgttgagagaacggctaaccggatcaccatgtgcagcattcattggagatgacaatatcgtgaaaggagtcaaatcggacaaattaatggcagacaggtgcgccacctggttgaatatggaagtcaagattatagatgctgtggtgggcgagaaagcgccttatttctgtggagggtttattttgtgtgactccgtgaccggcacagcgtgccgtgtggcagaccccctaaaaaggctgtttaagcttggcaaacctctggcagcagacgatgaacatgatgatgacaggagaagggcattgcatgaagagtcaacacgctggaaccgagtgggtattctttcagagctgtgcaaggcagtagaatcaaggtatgaaaccgtaggaacttccatcatagttatggccatgactactctagctagcagtgttaaatcattcagctacctgagaggggcccctataactctctacggctaacctgaatggactacgacgtatcacgcccaaacatttacagccgcggtgtcaaaaaccgcgtggacgtggttaacatccctgctgggaggatcagccgtaattattataattggcttggtgctggctactattgtggccatgtacgtgctgaccaaccagaaacataattgaatacagcagcaattggcaagctgcttacatagaactcgcggcgattggcatgccgccttaaaatttttattttattttttcttttcttttccgaatcggattttgtttttaatatttcaaaaaaaaaaaaaaaaaaaaaaaaaaaaaaaaaaaaaaaaaaaaaaaaaaaaaaaaaaaaaaaaaaaaaaaaaaaaaaaa

SEQ ID NO: 9 - DNA, 7894 bp, Venezuelan equine encephalitis virus
  source 1..7894: mol_type = other DNA
ataggcggcgcatgagagaagcccagaccaattacctacccaaaatggagaaagttcacgttgacatcgaggaagacagcccattcctcagagctttgcagcggagcttcccgcagtttgaggtagaagccaagcaggtcactgataatgaccatgctaatgccagagcgttttcgcatctggcttcaaaactgatcgaaacggaggtggacccatccgacacgatccttgacattggaagtgcgcccgcccgcagaatgtattctaagcacaagtatcattgtatctgtccgatgagatgtgcggaagatccggacagattgtataagtatgcaactaagctgaagaaaaactgtaaggaaataactgataaggaattggacaagaaaatgaaggagctcgccgccgtcatgagcgaccctgacctggaaactgagactatgtgcctccacgacgacgagtcgtgtcgctacgaagggcaagtcgctgtttaccaggatgtatacgcggttgacggaccgacaagtctctatcaccaagccaataagggagttagagtcgcctactggataggctttgacaccaccccttttatgtttaagaacttggctggagcatatccatcatactctaccaactgggccgacgaaaccgtgttaacggctcgtaacataggcctatgcagctctgacgttatggagcggtcacgtagagggatgtccattcttagaaagaagtatttgaaaccatccaacaatgttctattctctgttggctcgaccatctaccacgagaagagggacttactgaggagctggcacctgccgtctgtatttcacttacgtggcaagcaaaattacacatgtcggtgtgagactatagttagttgcgacgggtacgtcgttaaaagaatagctatcagtccaggcctgtatgggaagccttcaggctatgctgctacgatgcaccgcgagggattcttgtgctgcaaagtgacagacacattgaacggggagagggtctcttttcccgtgtgcacgtatgtgccagctacattgtgtgaccaaatgactggcatactggcaacagatgtcagtgcggacgacgcgcaaaaactgctggttgggctcaaccagcgtatagtcgtcaacggtcgcacccagagaaacaccaataccatgaaaaattaccttttgcccgtagtggcccaggcatttgctaggtgggcaaaggaatataaggaagatcaagaagatgaaaggccactaggactacgagatagacagttagtcatggggtgttgttgggcttttagaaggcacaagataacatctatttataagcgcccggatacccaaaccatcatcaaagtgaacagcgatttccactcattcgtgctgcccaggataggcagtaacacattggagatcgggctgagaacaagaatcaggaaaatgttagaggagcacaaggagccgtcacctctcattaccgccgaggacgtacaagaagctaagtgcgcagccgatgaggctaaggaggtgcgtgaagccgaggagttgcgcgcagctctaccacctttggcagctgatgttgaggagcccactctggaagccgatgtcgacttgatgttacaagaggctggggccggctcagtggagacacctcgtggcttgataaaggttaccagctacgatggcgaggacaagatcggctcttacgctgtgctttctccgcaggctgtactcaagagtgaaaaattatcttgcatccaccctctcgctgaacaagtcatagtgataacacactctggccgaaaagggcgttatgccgtggaaccataccatggtaaagtagtggtgccagagggacatgcaatacccgtccaggactttcaagctctgagtgaaagtgccaccattgtgtacaacgaacgtgagttcgtaaacaggtacctgcaccatattgccacacatggaggagcgctgaacactgatgaagaatattacaaaactgtcaagcccagcgagcacgacggcgaatacctgtacgacatcgacaggaaacagtgcgtcaagaaagaactagtcactgggctagggctcacaggcgagctggtggatcctcccttccatgaattcgcctacgagagtctgagaacacgaccagccgctccttaccaagtaccaaccataggggtgtatggcgtgccaggatcaggcaagtctggcatcattaaaagcgcagtcaccaaaaaagatctagtggtgagcgccaagaaagaaaactgtgcagaaattataagggacgtcaagaaaatgaaagggctggacgtcaatgccagaactgtggactcagtgctcttgaatggatgcaaacaccccgtagagaccctgtatattgacgaagcttttgcttgtcatgcaggtactctcagagcgctcatagccattataagacctaaaaaggcagtgctctgcggggatcccaaacagtgcggtttttttaacatgatgtgcctgaaagtgcattttaaccacgagatttgcacacaagtcttccacaaaagcatctctcgccgttgcactaaatctgtgacttcggtcgtctcaaccttgttttacgacaaaaaaatgagaacgacgaatccgaaagagactaagattgtgattgacactaccggcagtaccaaacctaagcaggacgatctcattctcacttgtttcagagggtgggtgaagcagttgcaaatagattacaaaggcaacgaaataatgacggcagctgcctctcaagggctgacccgtaaaggtgtgtatgccgttcggtacaaggtgaatgaaaatcctctgtacgcacccacctcagaacatgtgaacgtcctactgacccgcacggaggaccgcatcgtgtggaaaacactagccggcgacccatggataaaaacactgactgccaagtaccctgggaatttcactgccacgatagaggagtggcaagcagagcatgatgccatcatgaggcacatcttggagagaccggaccctaccgacgtcttccagaataaggcaaacgtgtgttgggccaaggctttagtgccggtgctgaagaccgctggcatagacatgaccactgaacaatggaacactgtggattattttgaaacggacaaagctcactcagcagagatagtattgaaccaactatgcgtgaggttctttggactcgatctggactccggtctattttctgcacccactgttccgttatccattaggaataatcactgggataactccccgtcgcctaacatgtacgggctgaataaagaagtggtccgtcagctctctcgcaggtacccacaactgcctcgggcagttgccactggaagagtctatgacatgaacactggtacactgcgcaattatgatccgcgcataaacctagtacctgtaaacagaagactgcctcatgctttagtcctccaccataatgaacacccacagagtgacttttcttcattcgtcagcaaattgaagggcagaactgtcctggtggtcggggaaaagttgtccgtcccaggcaaaatggttgactggttgtcagaccggcctgaggctaccttcagagctcggctggatttaggcatcccaggtgatgtgcccaaatatgacataatatttgttaatgtgaggaccccatataaataccatcactatcagcagtgtgaagaccatgccattaagcttagcatgttgaccaagaaagcttgtctgcatctgaatcccggcggaacctgtgtcagcataggttatggttacgctgacagggccagcgaaagcatcattggtgctatagcgcggcagttcaagttttcccgggtatgcaaaccgaaatcctcacttgaagagacggaagttctgtttgtattcattgggtacgatcgcaaggcccgtacgcacaatccttacaagctttcatcaaccttgaccaacatttatacaggttccagactccacgaagccggatgtgcaccctcatatcatgtggtgcgaggggatattgccacggccaccgaaggagtgattataaatgctgctaacagcaaaggacaacctggcggaggggtgtgcggagcgctgtataagaaattcccggaaagcttcgatttacagccgatcgaagtaggaaaagcgcgactggtcaaaggtgcagctaaacatatcattcatgccgtaggaccaaacttcaacaaagtttcggaggttgaaggtgacaaacagttggcagaggcttatgagtccatcgctaagattgtcaacgataacaattacaagtcagtagcgattccactgttgtccaccggcatcttttccgggaacaaagatcgactaacccaatcattgaaccatttgctgacagctttagacaccactgatgcagatgtagccatatactgcagggacaagaaatgggaaatgactctcaaggaagcagtggctaggagagaagcagtggaggagatatgcatatccgacgactcttcagtgacagaacctgatgcagagctggtgagggtgcatccgaagagttctttggctggaaggaagggctacagcacaagcgatggcaaaactttctcatatttggaagggaccaagtttcaccaggcggccaaggatatagcagaaattaatgccatgtggcccgttgcaacggaggccaatgagcaggtatgcatgtatatcctcggagaaagcatgagcagtattaggtcgaaatgccccgtcgaagagtcggaagcctccacaccacctagcacgctgccttgcttgtgcatccatgccatgactccagaaagagtacagcgcctaaaagcctcacgtccagaacaaattactgtgtgctcatcctttccattgccgaagtatagaatcactggtgtgcagaagatccaatgctcccagcctatattgttctcaccgaaagtgcctgcgtatattcatccaaggaagtatctcgtggaaacaccaccggtagacgagactccggagccatcggcagagaaccaatccacagaggggacacctgaacaaccaccacttataaccgaggatgagaccaggactagaacgcctgagccgatcatcatcgaagaggaagaagaggatagcataagtttgctgtcagatggcccgacccaccaggtgctgcaagtcgaggcagacattcacgggccgccctctgtatctagctcatcctggtccattcctcatgcatccgactttgatgtggacagtttatccatacttgacaccctggagggagctagcgtgaccagcggggcaacgtcagccgagactaactcttacttcgcaaagagtatggagtttctggcgcgaccggtgcctgcgcctcgaacagtattcaggaaccctccacatcccgctccgcgcacaagaacaccgtcacttgcacccagcagggcctgctcgagaaccagcctagtttccaccccgccaggcgtgaatagggtgatcactagagaggagctcgaggcgcttaccccgtcacgcactcctagcaggtcggtctcgagaaccagcctggtctccaacccgccaggcgtaaatagggtgattacaagagaggagtttgaggcgttcgtagcacaacaacaatgacggtttgatgcgggtgcatacatcttttcctccgacaccggtcaagggcatttacaacaaaaatcagtaaggcaaacggtgctatccgaagtggtgttggagaggaccgaattggagatttcgtatgccccgcgcctcgaccaagaaaaagaagaattactacgcaagaaattacagttaaatcccacacctgctaacagaagcagataccagtccaggaaggtggagaacatgaaagccataacagctagacgtattctgcaaggcctagggcattatttgaaggcagaaggaaaagtggagtgctaccgaaccctgcatcctgttcctttgtattcatctagtgtgaaccgtgccttttcaagccccaaggtcgcagtggaagcctgtaacgccatgttgaaagagaactttccgactgtggcttcttactgtattattccagagtacgatgcctatttggacatggttgacggagcttcatgctgcttagacactgccagtttttgccctgcaaagctgcgcagctttccaaagaaacactcctatttggaacccacaatacgatcggcagtgccttcagcgatccagaacacgctccagaacgtcctggcagctgccacaaaaagaaattgcaatgtcacgcaaatgagagaattgcccgtattggattcggcggcctttaatgtggaatgcttcaagaaatatgcgtgtaataatgaatattgggaaacgtttaaagaaaaccccatcaggcttactgaagaaaacgtggtaaattacattaccaaattaaaaggaccaaaagctgctgctctttttgcgaagacacataatttgaatatgttgcaggacataccaatggacaggtttgtaatggacttaaagagagacgtgaaagtgactccaggaacaaaacatactgaagaacggcccaaggtacaggtgatccaggctgccgatccgctagcaacagcgtatctgtgcggaatccaccgagagctggttaggagattaaatgcggtcctgcttccgaacattcatacactgtttgatatgtcggctgaagactttgacgctattatagccgagcacttccagcctggggattgtgttctggaaactgacatcgcgtcgtttgataaaagtgaggacgacgccatggctctgaccgcgttaatgattctggaagacttaggtgtggacgcagagctgttgacgctgattgaggcggctttcggcgaaatttcatcaatacatttgcccactaaaactaaatttaaattcggagccatgatgaaatctggaatgttcctcacactgtttgtgaacacagtcattaacattgtaatcgcaagcagagtgttgagagaacggctaaccggatcaccatgtgcagcattcattggagatgacaatatcgtgaaaggagtcaaatcggacaaattaatggcagacaggtgcgccacctggttgaatatggaagtcaagattatagatgctgtggtgggcgagaaagcgccttatttctgtggagggtttattttgtgtgactccgtgaccggcacagcgtgccgtgtggcagaccccctaaaaaggctgtttaagcttggcaaacctctggcagcagacgatgaacatgatgatgacaggagaagggcattgcatgaagagtcaacacgctggaaccgagtgggtattctttcagagctgtgcaaggcagtagaatcaaggtatgaaaccgtaggaacttccatcatagttatggccatgactactctagctagcagtgttaaatcattcagctacctgagaggggcccctataactctctacggctaacctgaatggactacgacgtatcacgcccaaacatttacagccgcggtgtcaaaaaccgcgtggacgtggttaacatccctgctgggaggatcagccgtaattattataattggcttggtgctggctactattgtggccatgtacgtgctgaccaaccagaaacataattgaatacagcagcaattggcaagctgcttacatagaactcgcggcgattggcatgccgccttaaaatttttattttatttttcttttcttttccgaatcggattttgtttttaatatttcaaaaaaaaaaaaaaaaaaaaaaaaaaaaaaaaaaaaaaaaaaaaaaaaaaaaaaaaaaaaaaaaaaaaaaaaaaaaaaaa

SEQ ID NO: 10-84 - skipped (75 entries)

SEQ ID NO: 85 - protein, 100 aa, synthetic construct
VTNTEMFVTAPDNLGYMYEVQWPGQTQPQIANCSVYDFFVWLHYYSVRDTVTNTEMFVTAPDNLGYMYEVQWPGQTQPQIANCSVYDFFVWLHYYSVRDT

SEQ ID NO: 86 - protein, 25 aa, synthetic construct
VTNTEMFVTAPDNLGYMYEVQWPGQ

SEQ ID NO: 87 - protein, 25 aa, synthetic construct
TQPQIANCSVYDFFVWLHYYSVRDT

SEQ ID NO: 88-29363 - skipped (29276 entries)

SEQ ID NO: 29364 - protein, 10 aa, synthetic construct
YVYVADVAAK

SEQ ID NO: 29365 - DNA, 28278 bp, synthetic construct
  source 1..28278: mol_type = other DNA
catcttcaataatatacctcaaactttttgtgcgcgttaatatgcaaatgaggcgtttgaatttggggaggaagggcggtgattggtcgagggatgagcgaccgttaggggcggggcgagtgacgttttgatgacgtggttgcgaggaggagccagtttgcaagttctcgtgggaaaagtgacgtcaaacgaggtgtggtttgaacacggaaatactcaattttcccgcgctctctgacaggaaatgaggtgtttctgggcggatgcaagtgaaaacgggccattttcgcgcgaaaactgaatgaggaagtgaaaatctgagtaatttcgcgtttatggcagggaggagtatttgccgagggccgagtagactttgaccgattacgtgggggtttcgattaccgtgtttttcacctaaatttccgcgtacggtgtcaaagtccggtgtttttacgtaggtgtcagctgatcgccagggtatttaaacctgcgctctccagtcaagaggccactcttgagtgccagcgagaagagttttctcctccgcgccgcgagtcagatctacactttgaaagtagggataaggtagcgagtgagtagtgttctggggcgggggaggacctgcatgagggccagaataactgaaatctgtgcttttctgtgtgttgcagcagcatgagcggaagcggctcctttgagggaggggtattcagcccttatctgacggggcgtctcccctcctgggcgggagtgcgtcagaatgtgatgggatccacggtggacggccggcccgtgcagcccgcgaactcttcaaccctgacctatgcaaccctgagctcttcgtcgttggacgcagctgccgccgcagctgctgcatctgccgccagcgccgtgcgcggaatggccatgggcgccggctactacggcactctggtggccaactcgagttccaccaataatcccgccagcctgaacgaggagaagctgttgctgctgatggcccagctcgaggccttgacccagcgcctgggcgagctgacccagcaggtggctcagctgcaggagcagacgcgggccgcggttgccacggtgaaatccaaataaaaaatgaatcaataaataaacggagacggttgttgattttaacacagagtctgaatctttatttgatttttcgcgcgcggtaggccctggaccaccggtctcgatcattgagcacccggtggatcttttccaggacccggtagaggtgggcttggatgttgaggtacatgggcatgagcccgtcccgggggtggaggtagctccattgcagggcctcgtgctcgggggtggtgttgtaaatcacccagtcatagcaggggcgcagggcatggtgttgcacaatatctttgaggaggagactgatggccacgggcagccctttggtgtaggtgtttacaaatctgttgagctgggagggatgcatgcggggggagatgaggtgcatcttggcctggatcttgagattggcgatgttaccgcccagatcccgcctggggttcatgttgtgcaggaccaccagcacggtgtatccggtgcacttggggaatttatcatgcaacttggaagggaaggcgtgaaagaatttggcgacgcctttgtgcccgcccaggttttccatgcactcatccatgatgatggcgatgggcccgtgggcggcggcctgggcaaagacgtttcgggggtcggacacatcatagttgtggtcctgggtgaggtcatcataggccattttaatgaatttggggcggagggtgccggactgggggacaaaggtaccctcgatcccgggggcgtagttcccctcacagatctgcatctcccaggctttgagctcggagggggggatcatgtccacctgcggggcgataaagaacacggtttccggggcgggggagatgagctgggccgaaagcaagttccggagcagctgggacttgccgcagccggtggggccgtagatgaccccgatgaccggctgcaggtggtagttgagggagagacagctgccgtcctcccggaggaggggggccacctcgttcatcatctcgcgcacgtgcatgttctcgcgcaccagttccgccaggaggcgctctccccccagggataggagctcctggagcgaggcgaagtttttcagcggcttgagtccgtcggccatgggcattttggagagggtttgttgcaagagttccaggcggtcccagagctcggtgatgtgctctacggcatctcgatccagcagacctcctcgtttcgcgggttgggacggctgcgggagtagggcaccagacgatgggcgtccagcgcagccagggtccggtccttccagggtcgcagcgtccgcgtcagggtggtctccgtcacggtgaaggggtgcgcgccgggctgggcgcttgcgagggtgcgcttcaggctcatccggctggtcgaaaaccgctcccgatcggcgccctgcgcgtcggccaggtagcaattgaccatgagttcgtagttgagcgcctcggccgcgtggcctttggcgcggagcttacctttggaagtctgcccgcaggcgggacagaggagggacttgagggcgtagagcttgggggcgaggaagacggactcgggggcgtaggcgtccgcgccgcagtgggcgcagacggtctcgcactccacgagccaggtgaggtcgggctggtcggggtcaaaaaccagtttcccgccgttctttttgatgcgtttcttacctttggtctccatgagctcgtgtccccgctgggtgacaaagaggctgtccgtgtccccgtagaccgactttatgggccggtcctcgagcggtgtgccgcggtcctcctcgtagaggaaccccgcccactccgagacgaaagcccgggtccaggccagcacgaaggaggccacgtgggacgggtagcggtcgttgtccaccagcgggtccaccttttccagggtatgcaaacacatgtccccctcgtccacatccaggaaggtgattggcttgtaagtgtaggccacgtgaccgggggtcccggccgggggggtataaaagggtgcgggtccctgctcgtcctcactgtcttccggatcgctgtccaggagcgccagctgttggggtaggtattccctctcgaaggcgggcatgacctcggcactcaggttgtcagtttctagaaacgaggaggatttgatattgacggtgccggcggagatgcctttcaagagcccctcgtccatctggtcagaaaagacgatctttttgttgtcgagcttggtggcgaaggagccgtagagggcgttggagaggagcttggcgatggagcgcatggtctggtttttttccttgtcggcgcgctccttggcggcgatgttgagctgcacgtactcgcgcgccacgcacttccattcggggaagacggtggtcagctcgtcgggcacgattctgacctgccagccccgattatgcagggtgatgaggtccacactggtggccacctcgccgcgcaggggctcattagtccagcagaggcgtccgcccttgcgcgagcagaaggggggcagggggtccagcatgacctcgtcgggggggtcggcatcgatggtgaagatgccgggcaggaggtcggggtcaaagtagctgatggaagtggccagatcgtccagggcagcttgccattcgcgcacggccagcgcgcgctcgtagggactgaggggcgtgccccagggcatgggatgggtaagcgcggaggcgtacatgccgcagatgtcgtagacgtagaggggctcctcgaggatgccgatgtaggtggggtagcagcgccccccgcggatgctggcgcgcacgtagtcatacagctcgtgcgagggggcgaggagccccgggcccaggttggtgcgactgggcttttcggcgcggtagacgatctggcggaaaatggcatgcgagttggaggagatggtgggcctttggaagatgttgaagtgggcgtggggcagtccgaccgagtcgcggatgaagtgggcgtaggagtcttgcagcttggcgacgagctcggcggtgactaggacgtccagagcgcagtagtcgagggtctcctggatgatgtcatacttgagctgtcccttttgtttccacagctcgcggttgagaaggaactcttcgcggtccttccagtactcttcgagggggaacccgtcctgatctgcacggtaagagcctagcatgtagaactggttgacggccttgtaggcgcagcagcccttctccacggggagggcgtaggcctgggcggccttgcgcagggaggtgtgcgtgagggcgaaagtgtccctgaccatgaccttgaggaactggtgcttgaagtcgatatcgtcgcagcccccctgctcccagagctggaagtccgtgcgcttcttgtaggcggggttgggcaaagcgaaagtaacatcgttgaagaggatcttgcccgcgcggggcataaagttgcgagtgatgcggaaaggttggggcacctcggcccggttgttgatgacctgggcggcgagcacgatctcgtcgaagccgttgatgttgtggcccacgatgtagagttccacgaatcgcggacggcccttgacgtggggcagtttcttgagctcctcgtaggtgagctcgtcggggtcgctgagcccgtgctgctcgagcgcccagtcggcgagatgggggttggcgcggaggaaggaagtccagagatccacggccagggcggtttgcagacggtcccggtactgacggaactgctgcccgacggccattttttcgggggtgacgcagtagaaggtgcgggggtccccgtgccagcgatcccatttgagctggagggcgagatcgagggcgagctcgacgagccggtcgtccccggagagtttcatgaccagcatgaaggggacgagctgcttgccgaaggaccccatccaggtgtaggtttccacatcgtaggtgaggaagagcctttcggtgcgaggatgcgagccgatggggaagaactggatctcctgccaccaattggaggaatggctgttgatgtgatggaagtagaaatgccgacggcgcgccgaacactcgtgcttgtgtttatacaagcggccacagtgctcgcaacgctgcacgggatgcacgtgctgcacgagctgtacctgagttcctttgacgaggaatttcagtgggaagtggagtcgtggcgcctgcatctcgtgctgtactacgtcgtggtggtcggcctggccctcttctgcctcgatggtggtcatgctgacgagcccgcgcgggaggcaggtccagacctcggcgcgagcgggtcggagagcgaggacgagggcgcgcaggccggagctgtccagggtcctgagacgctgcggagtcaggtcagtgggcagcggcggcgcgcggttgacttgcaggagtttttccagggcgcgcgggaggtccagatggtacttgatctccaccgcgccattggtggcgacgtcgatggcttgcagggtcccgtgcccctggggtgtgaccaccgtcccccgtttcttcttgggcggctggggcgacgggggcggtgcctcttccatggttagaagcggcggcgaggacgcgcgccgggcggcaggggcggctcggggcccggaggcaggggcggcaggggcacgtcggcgccgcgcgcgggtaggttctggtactgcgcccggagaagactggcgtgagcgacgacgcgacggttgacgtcctggatctgacgcctctgggtgaaggccacgggacccgtgagtttgaacctgaaagagagttcgacagaatcaatctcggtatcgttgacggcggcctgccgcaggatctcttgcacgtcgcccgagttgtcctggtaggcgatctcggtcatgaactgctcgatctcctcctcttgaaggtctccgcggccggcgcgctccacggtggccgcgaggtcgttggagatgcggcccatgagctgcgagaaggcgttcatgcccgcctcgttccagacgcggctgtagaccacgacgccctcgggatcgcgggcgcgcatgaccacctgggcgaggttgagctccacgtggcgcgtgaagaccgcgtagttgcagaggcgctggtagaggtagttgagcgtggtggcgatgtgctcggtgacgaagaaatacatgatccagcggcggagcggcatctcgctgacgtcgcccagcgcctccaaacgttccatggcctcgtaaaagtccacggcgaagttgaaaaactgggagttgcgcgccgagacggtcaactcctcctccagaagacggatgagctcggcgatggtggcgcgcacctcgcgctcgaaggcccccgggagttcctccacttcctcttcttcctcctccactaacatctcttctacttcctcctcaggcggcagtggtggcgggggagggggcctgcgtcgccggcggcgcacgggcagacggtcgatgaagcgctcgatggtctcgccgcgccggcgtcgcatggtctcggtgacggcgcgcccgtcctcgcggggccgcagcgtgaagacgccgccgcgcatctccaggtggccgggggggtccccgttgggcagggagagggcgctgacgatgcatcttatcaattgccccgtagggactccgcgcaaggacctgagcgtctcgagatccacgggatctgaaaaccgctgaacgaaggcttcgagccagtcgcagtcgcaaggtaggctgagcacggtttcttctggcgggtcatgttggttgggagcggggcgggcgatgctgctggtgatgaagttgaaataggcggttctgagacggcggatggtggcgaggagcaccaggtctttgggcccggcttgctggatgcgcagacggtcggccatgccccaggcgtggtcctgacacctggccaggtccttgtagtagtcctgcatgagccgctccacgggcacctcctcctcgcccgcgcggccgtgcatgcgcgtgagcccgaagccgcgctggggctggacgagcgccaggtcggcgacgacgcgctcggcgaggatggcttgctggatctgggtgagggtggtctggaagtcatcaaagtcgacgaagcggtggtaggctccggtgttgatggtgtaggagcagttggccatgacggaccagttgacggtctggtggcccggacgcacgagctcgtggtacttgaggcgcgagtaggcgcgcgtgtcgaagatgtagtcgttgcaggtgcgcaccaggtactggtagccgatgaggaagtgcggcggcggctggcggtagagcggccatcgctcggtggcgggggcgccgggcgcgaggtcctcgagcatggtgcggtggtagccgtagatgtacctggacatccaggtgatgccggcggcggtggtggaggcgcgcgggaactcgcggacgcggttccagatgttgcgcagcggcaggaagtagttcatggtgggcacggtctggcccgtgaggcgcgcgcagtcgtggatgctctatacgggcaaaaacgaaagcggtcagcggctcgactccgtggcctggaggctaagcgaacgggttgggctgcgcgtgtaccccggttcgaatctcgaatcaggctggagccgcagctaacgtggtattggcactcccgtctcgacccaagcctgcaccaaccctccaggatacggaggcgggtcgttttgcaacttttttttggaggccggatgagactagtaagcgcggaaagcggccgaccgcgatggctcgctgccgtagtctggagaagaatcgccagggttgcgttgcggtgtgccccggttcgaggccggccggattccgcggctaacgagggcgtggctgccccgtcgtttccaagaccccatagccagccgacttctccagttacggagcgagcccctcttttgttttgtttgtttttgccagatgcatcccgtactgcggcagatgcgcccccaccaccctccaccgcaacaacagccccctccacagccggcgcttctgcccccgccccagcagcaacttccagccacgaccgccgcggccgccgtgagcggggctggacagagttatgatcaccagctggccttggaagagggcgaggggctggcgcgcctgggggcgtcgtcgccggagcggcacccgcgcgtgcagatgaaaagggacgctcgcgaggcctacgtgcccaagcagaacctgttcagagacaggagcggcgaggagcccgaggagatgcgcgcggcccggttccacgcggggcgggagctgcggcgcggcctggaccgaaagagggtgctgagggacgaggatttcgaggcggacgagctgacggggatcagccccgcgcgcgcgcacgtggccgcggccaacctggtcacggcgtacgagcagaccgtgaaggaggagagcaacttccaaaaatccttcaacaaccacgtgcgcaccctgatcgcgcgcgaggaggtgaccctgggcctgatgcacctgtgggacctgctggaggccatcgtgcagaaccccaccagcaagccgctgacggcgcagctgttcctggtggtgcagcatagtcgggacaacgaagcgttcagggaggcgctgctgaatatcaccgagcccgagggccgctggctcctggacctggtgaacattctgcagagcatcgtggtgcaggagcgcgggctgccgctgtccgagaagctggcggccatcaacttctcggtgctgagtttgggcaagtactacgctaggaagatctacaagaccccgtacgtgcccatagacaaggaggtgaagatcgacgggttttacatgcgcatgaccctgaaagtgctgaccctgagcgacgatctgggggtgtaccgcaacgacaggatgcaccgtgcggtgagcgccagcaggcggcgcgagctgagcgaccaggagctgatgcatagtctgcagcgggccctgaccggggccgggaccgagggggagagctactttgacatgggcgcggacctgcactggcagcccagccgccgggccttggaggcggcggcaggaccctacgtagaagaggtggacgatgaggtggacgaggagggcgagtacctggaagactgatggcgcgaccgtatttttgctagatgcaacaacaacagccacctcctgatcccgcgatgcgggcggcgctgcagagccagccgtccggcattaactcctcggacgattggacccaggccatgcaacgcatcatggcgctgacgacccgcaaccccgaagcctttagacagcagccccaggccaaccggctctcggccatcctggaggccgtggtgccctcgcgctccaaccccacgcacgagaaggtcctggccatcgtgaacgcgctggtggagaacaaggccatccgcggcgacgaggccggcctggtgtacaacgcgctgctggagcgcgtggcccgctacaacagcaccaacgtgcagaccaacctggaccgcatggtgaccgacgtgcgcgaggccgtggcccagcgcgagcggttccaccgcgagtccaacctgggatccatggtggcgctgaacgccttcctcagcacccagcccgccaacgtgccccggggccaggaggactacaccaacttcatcagcgccctgcgcctgatggtgaccgaggtgccccagagcgaggtgtaccagtccgggccggactacttcttccagaccagtcgccagggcttgcagaccgtgaacctgagccaggctttcaagaacttgcagggcctgtggggcgtgcaggccccggtcggggaccgcgcgacggtgtcgagcctgctgacgccgaactcgcgcctgctgctgctgctggtggcccccttcacggacagcggcagcatcaaccgcaactcgtacctgggctacctgattaacctgtaccgcgaggccatcggccaggcgcacgtggacgagcagacctaccaggagatcacccacgtgagccgcgccctgggccaggacgacccgggcaacctggaagccaccctgaactttttgctgaccaaccggtcgcagaagatcccgccccagtacgcgctcagcaccgaggaggagcgcatcctgcgttacgtgcagcagagcgtgggcctgttcctgatgcaggagggggccacccccagcgccgcgctcgacatgaccgcgcgcaacatggagcccagcatgtacgccagcaaccgcccgttcatcaataaactgatggactacttgcatcgggcggccgccatgaactctgactatttcaccaacgccatcctgaatccccactggctcccgccgccggggttctacacgggcgagtacgacatgcccgaccccaatgacgggttcctgtgggacgatgtggacagcagcgtgttctccccccgaccgggtgctaacgagcgccccttgtggaagaaggaaggcagcgaccgacgcccgtcctcggcgctgtccggccgcgagggtgctgccgcggcggtgcccgaggccgccagtcctttcccgagcttgcccttctcgctgaacagtatccgcagcagcgagctgggcaggatcacgcgcccgcgcttgctgggcgaagaggagtacttgaatgactcgctgttgagacccgagcgggagaagaacttccccaataacgggatagaaagcctggtggacaagatgagccgctggaagacgtatgcgcaggagcacagggacgatccccgggcgtcgcagggggccacgagccggggcagcgccgcccgtaaacgccggtggcacgacaggcagcggggacagatgtgggacgatgaggactccgccgacgacagcagcgtgttggacttgggtgggagtggtaacccgttcgctcacctgcgcccccgtatcgggcgcatgatgtaagagaaaccgaaaataaatgatactcaccaaggccatggcgaccagcgtgcgttcgtttcttctctgttgttgttgtatctagtatgatgaggcgtgcgtacccggagggtcctcctccctcgtacgagagcgtgatgcagcaggcgatggcggcggcggcgatgcagcccccgctggaggctccttacgtgcccccgcggtacctggcgcctacggaggggcggaacagcattcgttactcggagctggcacccttgtacgataccacccggttgtacctggtggacaacaagtcggcggacatcgcctcgctgaactaccagaacgaccacagcaacttcctgaccaccgtggtgcagaacaatgacttcacccccacggaggccagcacccagaccatcaactttgacgagcgctcgcggtggggcggccagctgaaaaccatcatgcacaccaacatgcccaacgtgaacgagttcatgtacagcaacaagttcaaggcgcgggtgatggtctcccgcaagacccccaatggggtgacagtgacagaggattatgatggtagtcaggatgagctgaagtatgaatgggtggaatttgagctgcccgaaggcaacttctcggtgaccatgaccatcgacctgatgaacaacgccatcatcgacaattacttggcggtggggcggcagaacggggtgctggagagcgacatcggcgtgaagttcgacactaggaacttcaggctgggctgggaccccgtgaccgagctggtcatgcccggggtgtacaccaacgaggctttccatcccgatattgtcttgctgcccggctgcggggtggacttcaccgagagccgcctcagcaacctgctgggcattcgcaagaggcagcccttccaggaaggcttccagatcatgtacgaggatctggaggggggcaacatccccgcgctcctggatgtcgacgcctatgagaaaagcaaggaggatgcagcagctgaagcaactgcagccgtagctaccgcctctaccgaggtcaggggcgataattttgcaagcgccgcagcagtggcagcggccgaggcggctgaaaccgaaagtaagatagtcattcagccggtggagaaggatagcaagaacaggagctacaacgtactaccggacaagataaacaccgcctaccgcagctggtacctagcctacaactatggcgaccccgagaagggcgtgcgctcctggacgctgctcaccacctcggacgtcacctgcggcgtggagcaagtctactggtcgctgcccgacatgatgcaagacccggtcaccttccgctccacgcgtcaagttagcaactacccggtggtgggcgccgagctcctgcccgtctactccaagagcttcttcaacgagcaggccgtctactcgcagcagctgcgcgccttcacctcgcttacgcacgtcttcaaccgcttccccgagaaccagatcctcgtccgcccgcccgcgcccaccattaccaccgtcagtgaaaacgttcctgctctcacagatcacgggaccctgccgctgcgcagcagtatccggggagtccagcgcgtgaccgttactgacgccagacgccgcacctgcccctacgtctacaaggccctgggcatagtcgcgccgcgcgtcctctcgagccgcaccttctaaatgtccattctcatctcgcccagtaataacaccggttggggcctgcgcgcgcccagcaagatgtacggaggcgctcgccaacgctccacgcaacaccccgtgcgcgtgcgcgggcacttccgcgctccctggggcgccctcaagggccgcgtgcggtcgcgcaccaccgtcgacgacgtgatcgaccaggtggtggccgacgcgcgcaactacacccccgccgccgcgcccgtctccaccgtggacgccgtcatcgacagcgtggtggccgacgcgcgccggtacgcccgcgccaagagccggcggcggcgcatcgcccggcggcaccggagcacccccgccatgcgcgcggcgcgagccttgctgcgcagggccaggcgcacgggacgcagggccatgctcagggcggccagacgcgcggcttcaggcgccagcgccggcaggacccggagacgcgcggccacggcggcggcagcggccatcgccagcatgtcccgcccgcggcgagggaacgtgtactgggtgcgcgacgccgccaccggtgtgcgcgtgcccgtgcgcacccgcccccctcgcacttgaagatgttcacttcgcgatgttgatgtgtcccagcggcgaggaggatgtccaagcgcaaattcaaggaagagatgctccaggtcatcgcgcctgagatctacggccctgcggtggtgaaggaggaaagaaagccccgcaaaatcaagcgggtcaaaaaggacaaaaaggaagaagaaagtgatgtggacggattggtggagtttgtgcgcgagttcgccccccggcggcgcgtgcagtggcgcgggcggaaggtgcaaccggtgctgagacccggcaccaccgtggtcttcacgcccggcgagcgctccggcaccgcttccaagcgctcctacgacgaggtgtacggggatgatgatattctggagcaggcggccgagcgcctgggcgagtttgcttacggcaagcgcagccgttccgcaccgaaggaagaggcggtgtccatcccgctggaccacggcaaccccacgccgagcctcaagcccgtgaccttgcagcaggtgctgccgaccgcggcgccgcgccgggggttcaagcgcgagggcgaggatctgtaccccaccatgcagctgatggtgcccaagcgccagaagctggaagacgtgctggagaccatgaaggtggacccggacgtgcagcccgaggtcaaggtgcggcccatcaagcaggtggccccgggcctgggcgtgcagaccgtggacatcaagattcccacggagcccatggaaacgcagaccgagcccatgatcaagcccagcaccagcaccatggaggtgcagacggatccctggatgccatcggctcctagtcgaagaccccggcgcaagtacggcgcggccagcctgctgatgcccaactacgcgctgcatccttccatcatccccacgccgggctaccgcggcacgcgcttctaccgcggtcataccagcagccgccgccgcaagaccaccactcgccgccgccgtcgccgcaccgccgctgcaaccacccctgccgccctggtgcggagagtgtaccgccgcggccgcgcacctctgaccctgccgcgcgcgcgctaccacccgagcatcgccatttaaactttcgcctgctttgcagatcaatggccctcacatgccgccttcgcgttcccattacgggctaccgaggaagaaaaccgcgccgtagaaggctggcggggaacgggatgcgtcgccaccaccaccggcggcggcgcgccatcagcaagcggttggggggaggcttcctgcccgcgctgatccccatcatcgccgcggcgatcggggcgatccccggcattgcttccgtggcggtgcaggcctctcagcgccactgagacacacttggaaacatcttgtaataaaccaatggactctgacgctcctggtcctgtgatgtgttttcgtagacagatggaagacatcaatttttcgtccctggctccgcgacacggcacgcggccgttcatgggcacctggagcgacatcggcaccagccaactgaacgggggcgccttcaattggagcagtctctggagcgggcttaagaatttcgggtccacgcttaaaacctatggcagcaaggcgtggaacagcaccacagggcaggcgctgagggataagctgaaagagcagaacttccagcagaaggtggtcgatgggctcgcctcgggcatcaacggggtggtggacctggccaaccaggccgtgcagcggcagatcaacagccgcctggacccggtgccgcccgccggctccgtggagatgccgcaggtggaggaggagctgcctcccctggacaagcggggcgagaagcgaccccgccccgatgcggaggagacgctgctgacgcacacggacgagccgcccccgtacgaggaggcggtgaaactgggtctgcccaccacgcggcccatcgcgcccctggccaccggggtgctgaaacccgaaaagcccgcgaccctggacttgcctcctccccagccttcccgcccctctacagtggctaagcccctgccgccggtggccgtggcccgcgcgcgacccgggggcaccgcccgccctcatgcgaactggcagagcactctgaacagcatcgtgggtctgggagtgcagagtgtgaagcgccgccgctgctattaaacctaccgtagcgcttaacttgcttgtctgtgtgtgtatgtattatgtcgccgccgccgctgtccaccagaaggaggagtgaagaggcgcgtcgccgagttgcaagatggccaccccatcgatgctgccccagtgggcgtacatgcacatcgccggacaggacgcttcggagtacctgagtccgggtctggtgcagtttgcccgcgccacagacacctacttcagtctggggaacaagtttaggaaccccacggtggcgcccacgcacgatgtgaccaccgaccgcagccagcggctgacgctgcgcttcgtgcccgtggaccgcgaggacaacacctactcgtacaaagtgcgctacacgctggccgtgggcgacaaccgcgtgctggacatggccagcacctactttgacatccgcggcgtgctggatcggggccctagcttcaaaccctactccggcaccgcctacaacagtctggcccccaagggagcacccaacacttgtcagtggacatataaagccgatggtgaaactgccacagaaaaaacctatacatatggaaatgcacccgtgcagggcattaacatcacaaaagatggtattcaacttggaactgacaccgatgatcagccaatctacgcagataaaacctatcagcctgaacctcaagtgggtgatgctgaatggcatgacatcactggtactgatgaaaagtatggaggcagagctcttaagcctgataccaaaatgaagccttgttatggttcttttgccaagcctactaataaagaaggaggtcaggcaaatgtgaaaacaggaacaggcactactaaagaatatgacatagacatggctttctttgacaacagaagtgcggctgctgctggcctagctccagaaattgttttgtatactgaaaatgtggatttggaaactccagatacccatattgtatacaaagcaggcacagatgacagcagctcttctattaatttgggtcagcaagccatgcccaacagacctaactacattggtttcagagacaactttatcgggctcatgtactacaacagcactggcaatatgggggtgctggccggtcaggcttctcagctgaatgctgtggttgacttgcaagacagaaacaccgagctgtcctaccagctcttgcttgactctctgggtgacagaacccggtatttcagtatgtggaatcaggcggtggacagctatgatcctgatgtgcgcattattgaaaatcatggtgtggaggatgaacttcccaactattgtttccctctggatgctgttggcagaacagatacttatcagggaattaaggctaatggaactgatcaaaccacatggaccaaagatgacagtgtcaatgatgctaatgagataggcaagggtaatccattcgccatggaaatcaacatccaagccaacctgtggaggaacttcctctacgccaacgtggccctgtacctgcccgactcttacaagtacacgccggccaatgttaccctgcccaccaacaccaacacctacgattacatgaacggccgggtggtggcgccctcgctggtggactcctacatcaacatcggggcgcgctggtcgctggatcccatggacaacgtgaaccccttcaaccaccaccgcaatgcggggctgcgctaccgctccatgctcctgggcaacgggcgctacgtgcccttccacatccaggtgccccagaaatttttcgccatcaagagcctcctgctcctgcccgggtcctacacctacgagtggaacttccgcaaggacgtcaacatgatcctgcagagctccctcggcaacgacctgcgcacggacggggcctccatctccttcaccagcatcaacctctacgccaccttcttccccatggcgcacaacacggcctccacgctcgaggccatgctgcgcaacgacaccaacgaccagtccttcaacgactacctctcggcggccaacatgctctaccccatcccggccaacgccaccaacgtgcccatctccatcccctcgcgcaactgggccgccttccgcggctggtccttcacgcgtctcaagaccaaggagacgccctcgctgggctccgggttcgacccctacttcgtctactcgggctccatcccctacctcgacggcaccttctacctcaaccacaccttcaagaaggtctccatcaccttcgactcctccgtcagctggcccggcaacgaccggctcctgacgcccaacgagttcgaaatcaagcgcaccgtcgacggcgagggctacaacgtggcccagtgcaacatgaccaaggactggttcctggtccagatgctggcccactacaacatcggctaccagggcttctacgtgcccgagggctacaaggaccgcatgtactccttcttccgcaacttccagcccatgagccgccaggtggtggacgaggtcaactacaaggactaccaggccgtcaccctggcctaccagcacaacaactcgggcttcgtcggctacctcgcgcccaccatgcgccagggccagccctaccccgccaactacccctacccgctcatcggcaagagcgccgtcaccagcgtcacccagaaaaagttcctctgcgacagggtcatgtggcgcatccccttctccagcaacttcatgtccatgggcgcgctcaccgacctcggccagaacatgctctatgccaactccgcccacgcgctagacatgaatttcgaagtcgaccccatggatgagtccacccttctctatgttgtcttcgaagtcttcgacgtcgtccgagtgcaccagccccaccgcggcgtcatcgaggccgtctacctgcgcacccccttctcggccggtaacgccaccacctaagctcttgcttcttgcaagccatggccgcgggctccggcgagcaggagctcagggccatcatccgcgacctgggctgcgggccctacttcctgggcaccttcgataagcgcttcccgggattcatggccccgcacaagctggcctgcgccatcgtcaacacggccggccgcgagaccgggggcgagcactggctggccttcgcctggaacccgcgctcgaacacctgctacctcttcgaccccttcgggttctcggacgagcgcctcaagcagatctaccagttcgagtacgagggcctgctgcgccgcagcgccctggccaccgaggaccgctgcgtcaccctggaaaagtccacccagaccgtgcagggtccgcgctcggccgcctgcgggctcttctgctgcatgttcctgcacgccttcgtgcactggcccgaccgccccatggacaagaaccccaccatgaacttgctgacgggggtgcccaacggcatgctccagtcgccccaggtggaacccaccctgcgccgcaaccaggaggcgctctaccgcttcctcaactcccactccgcctactttcgctcccaccgcgcgcgcatcgagaaggccaccgccttcgaccgcatgaatcaagacatgtaaaccgtgtgtgtatgttaaatgtctttaataaacagcactttcatgttacacatgcatctgagatgatttatttagaaatcgaaagggttctgccgggtctcggcatggcccgcgggcagggacacgttgcggaactggtacttggccagccacttgaactcggggatcagcagtttgggcagcggggtgtcggggaaggagtcggtccacagcttccgcgtcagttgcagggcgcccagcaggtcgggcgcggagatcttgaaatcgcagttgggacccgcgttctgcgcgcgggagttgcggtacacggggttgcagcactggaacaccatcagggccgggtgcttcacgctcgccagcaccgtcgcgtcggtgatgctctccacgtcgaggtcctcggcgttggccatcccgaagggggtcatcttgcaggtctgccttcccatggtgggcacgcacccgggcttgtggttgcaatcgcagtgcagggggatcagcatcatctgggcctggtcggcgttcatccccgggtacatggccttcatgaaagcctccaattgcctgaacgcctgctgggccttggctccctcggtgaagaagaccccgcaggacttgctagagaactggttggtggcgcacccggcgtcgtgcacgcagcagcgcgcgtcgttgttggccagctgcaccacgctgcgcccccagcggttctgggtgatcttggcccggtcggggttctccttcagcgcgcgctgcccgttctcgctcgccacatccatctcgatcatgtgctccttctggatcatggtggtcccgtgcaggcaccgcagcttgccctcggcctcggtgcacccgtgcagccacagcgcgcacccggtgcactcccagttcttgtgggcgatctgggaatgcgcgtgcacgaagccctgcaggaagcggcccatcatggtggtcagggtcttgttgctagtgaaggtcagcggaatgccgcggtgctcctcgttgatgtacaggtggcagatgcggcggtacacctcgccctgctcgggcatcagctggaagttggctttcaggtcggtctccacgcggtagcggtccatcagcatagtcatgatttccatacccttctcccaggccgagacgatgggcaggctcatagggttcttcaccatcatcttagcgctagcagccgcggccagggggtcgctctcgtccagggtctcaaagctccgcttgccgtccttctcggtgatccgcaccggggggtagctgaagcccacggccgccagctcctcctcggcctgtctttcgtcctcgctgtcctggctgacgtcctgcaggaccacatgcttggtcttgcggggtttcttcttgggcggcagcggcggcggagatgttggagatggcgagggggagcgcgagttctcgctcaccactactatctcttcctcttcttggtccgaggccacgcggcggtaggtatgtctcttcgggggcagaggcggaggcgacgggctctcgccgccgcgacttggcggatggctggcagagccccttccgcgttcgggggtgcgctcccggcggcgctctgactgacttcctccgcggccggccattgtgttctcctagggaggaacaacaagcatggagactcagccatcgccaacctcgccatctgcccccaccgccgacgagaagcagcagcagcagaatgaaagcttaaccgccccgccgcccagccccgccacctccgacgcggccgtcccagacatgcaagagatggaggaatccatcgagattgacctgggctatgtgacgcccgcggagcacgaggaggagctggcagtgcgcttttcacaagaagagatacaccaagaacagccagagcaggaagcagagaatgagcagagtcaggctgggctcgagcatgacggcgactacctccacctgagcgggggggaggacgcgctcatcaagcatctggcccggcaggccaccatcgtcaaggatgcgctgctcgaccgcaccgaggtgcccctcagcgtggaggagctcagccgcgcctacgagttgaacctcttctcgccgcgcgtgccccccaagcgccagcccaatggcacctgcgagcccaacccgcgcctcaacttctacccggtcttcgcggtgcccgaggccctggccacctaccacatctttttcaagaaccaaaagatccccgtctcctgccgcgccaaccgcacccgcgccgacgcccttttcaacctgggtcccggcgcccgcctacctgatatcgcctccttggaagaggttcccaagatcttcgagggtctgggcagcgacgagactcgggccgcgaacgctctgcaaggagaaggaggagagcatgagcaccacagcgccctggtcgagttggaaggcgacaacgcgcggctggcggtgctcaaacgcacggtcgagctgacccatttcgcctacccggctctgaacctgccccccaaagtcatgagcgcggtcatggaccaggtgctcatcaagcgcgcgtcgcccatctccgaggacgagggcatgcaagactccgaggagggcaagcccgtggtcagcgacgagcagctggcccggtggctgggtcctaatgctagtccccagagtttggaagagcggcgcaaactcatgatggccgtggtcctggtgaccgtggagctggagtgcctgcgccgcttcttcgccgacgcggagaccctgcgcaaggtcgaggagaacctgcactacctcttcaggcacgggttcgtgcgccaggcctgcaagatctccaacgtggagctgaccaacctggtctcctacatgggcatcttgcacgagaaccgcctggggcagaacgtgctgcacaccaccctgcgcggggaggcccggcgcgactacatccgcgactgcgtctacctctacctctgccacacctggcagacgggcatgggcgtgtggcagcagtgtctggaggagcagaacctgaaagagctctgcaagctcctgcagaagaacctcaagggtctgtggaccgggttcgacgagcgcaccaccgcctcggacctggccgacctcattttccccgagcgcctcaggctgacgctgcgcaacggcctgcccgactttatgagccaaagcatgttgcaaaactttcgctctttcatcctcgaacgctccggaatcctgcccgccacctgctccgcgctgccctcggacttcgtgccgctgaccttccgcgagtgccccccgccgctgtggagccactgctacctgctgcgcctggccaactacctggcctaccactcggacgtgatcgaggacgtcagcggcgagggcctgctcgagtgccactgccgctgcaacctctgcacgccgcaccgctccctggcctgcaacccccagctgctgagcgagacccagatcatcggcaccttcgagttgcaagggcccagcgaaggcgagggttcagccgccaaggggggtctgaaactcaccccggggctgtggacctcggcctacttgcgcaagttcgtgcccgaggactaccatcccttcgagatcaggttctacgaggaccaatcccatccgcccaaggccgagctgtcggcctgcgtcatcacccagggggcgatcctggcccaattgcaagccatccagaaatcccgccaagaattcttgctgaaaaagggccgcggggtctacctcgacccccagaccggtgaggagctcaaccccggcttcccccaggatgccccgaggaaacaagaagctgaaagtggagctgccgcccgtggaggatttggaggaagactgggagaacagcagtcaggcagaggaggaggagatggaggaagactgggacagcactcaggcagaggaggacagcctgcaagacagtctggaggaagacgaggaggaggcagaggaggaggtggaagaagcagccgccgccagaccgtcgtcctcggcgggggagaaagcaagcagcacggataccatctccgctccgggtcggggtcccgctcgaccacacagtagatgggacgagaccggacgattcccgaaccccaccacccagaccggtaagaaggagcggcagggatacaagtcctggcgggggcacaaaaacgccatcgtctcctgcttgcaggcctgcgggggcaacatctccttcacccggcgctacctgctcttccaccgcggggtgaactttccccgcaacatcttgcattactaccgtcacctccacagcccctactacttccaagaagaggcagcagcagcagaaaaagaccagcagaaaaccagcagctagaaaatccacagcggcggcagcaggtggactgaggatcgcggcgaacgagccggcgcaaacccgggagctgaggaaccggatctttcccaccctctatgccatcttccagcagagtcgggggcaggagcaggaactgaaagtcaagaaccgttctctgcgctcgctcacccgcagttgtctgtatcacaagagcgaagaccaacttcagcgcactctcgaggacgccgaggctctcttcaacaagtactgcgcgctcactcttaaagagtagcccgcgcccgcccagtcgcagaaaaaggcgggaattacgtcacctgtgcccttcgccctagccgcctccacccatcatcatgagcaaagagattcccacgccttacatgtggagctaccagccccagatgggcctggccgccggtgccgcccaggactactccacccgcatgaattggctcagcgccgggcccgcgatgatctcacgggtgaatgacatccgcgcccaccgaaaccagatactcctagaacagtcagcgctcaccgccacgccccgcaatcacctcaatccgcgtaattggcccgccgccctggtgtaccaggaaattccccagcccacgaccgtactacttccgcgagacgcccaggccgaagtccagctgactaactcaggtgtccagctggcgggcggcgccaccctgtgtcgtcaccgccccgctcagggtataaagcggctggtgatccggggcagaggcacacagctcaacgacgaggtggtgagctcttcgctgggtctgcgacctgacggagtcttccaactcgccggatcggggagatcttccttcacgcctcgtcaggccgtcctgactttggagagttcgtcctcgcagccccgctcgggtggcatcggcactctccagttcgtggaggagttcactccctcggtctacttcaaccccttctccggctcccccggccactacccggacgagttcatcccgaacttcgacgccatcagcgagtcggtggacggctacgattgaaactaatcacccccttatccagtgaaataaagatcatattgatgatgattttacagaaataaaaaataatcatttgatttgaaataaagatacaatcatattgatgatttgagtttaacaaaaaaataaagaatcacttacttgaaatctgataccaggtctctgtccatgttttctgccaacaccacttcactcccctcttcccagctctggtactgcaggccccggcgggctgcaaacttcctccacacgctgaaggggatgtcaaattcctcctgtccctcaatcttcattttatcttctatcagatgtccaaaaagcgcgtccgggtggatgatgacttcgaccccgtctacccctacgatgcagacaacgcaccgaccgtgcccttcatcaacccccccttcgtctcttcagatggattccaagagaagcccctgggggtgttgtccctgcgactggccgaccccgtcaccaccaagaacggggaaatcaccctcaagctgggagagggggtggacctcgattcctcgggaaaactcatctccaacacggccaccaaggccgccgcccctctcagtttttccaacaacaccatttcccttaacatggatcaccccttttacactaaagatggaaaattatccttacaagtttctccaccattaaatatactgagaacaagcattctaaacacactagctttaggttttggatcaggtttaggactccgtggctctgccttggcagtacagttagtctctccacttacatttgatactgatggaaacataaagcttaccttagacagaggtttgcatgttacaacaggagatgcaattgaaagcaacataagctgggctaaaggtttaaaatttgaagatggagccatagcaaccaacattggaaatgggttagagtttggaagcagtagtacagaaacaggtgttgatgatgcttacccaatccaagttaaacttggatctggccttagctttgacagtacaggagccataatggctggtaacaaagaagacgataaactcactttgtggacaacacctgatccatcaccaaactgtcaaatactcgcagaaaatgatgcaaaactaacactttgcttgactaaatgtggtagtcaaatactggccactgtgtcagtcttagttgtaggaagtggaaacctaaaccccattactggcaccgtaagcagtgctcaggtgtttctacgttttgatgcaaacggtgttcttttaacagaacattctacactaaaaaaatactgggggtataggcagggagatagcatagatggcactccatataccaatgctgtaggattcatgcccaatttaaaagcttatccaaagtcacaaagttctactactaaaaataatatagtagggcaagtatacatgaatggagatgtttcaaaacctatgcttctcactataaccctcaatggtactgatgacagcaacagtacatattcaatgtcattttcatacacctggactaatggaagctatgttggagcaacatttggggctaactcttataccttctcatacatcgcccaagaatgaacactgtatcccaccctgcatgccaacccttcccaccccactctgtggaacaaactctgaaacacaaaataaaataaagttcaagtgttttattgattcaacagttttacaggattcgagcagttatttttcctccaccctcccaggacatggaatacaccaccctctccccccgcacagccttgaacatctgaatgccattggtgatggacatgcttttggtctccacgttccacacagtttcagagcgagccagtctcgggtcggtcagggagatgaaaccctccgggcactcccgcatctgcacctcacagctcaacagctgaggattgtcctcggtggtcgggatcacggttatctggaagaagcagaagagcggcggtgggaatcatagtccgcgaacgggatcggccggtggtgtcgcatcaggccccgcagcagtcgctgccgccgccgctccgtcaagctgctgctcagggggtccgggtccagggactccctcagcatgatgcccacggccctcagcatcagtcgtctggtgcggcgggcgcagcagcgcatgcggatctcgctcaggtcgctgcagtacgtgcaacacagaaccaccaggttgttcaacagtccatagttcaacacgctccagccgaaactcatcgcgggaaggatgctacccacgtggccgtcgtaccagatcctcaggtaaatcaagtggtgccccctccagaacacgctgcccacgtacatgatctccttgggcatgtggcggttcaccacctcccggtaccacatcaccctctggttgaacatgcagccccggatgatcctgcggaaccacagggccagcaccgccccgcccgccatgcagcgaagagaccccgggtcccggcaatggcaatggaggacccaccgctcgtacccgtggatcatctgggagctgaacaagtctatgttggcacagcacaggcatatgctcatgcatctcttcagcactctcaactcctcgggggtcaaaaccatatcccagggcacggggaactcttgcaggacagcgaaccccgcagaacagggcaatcctcgcacagaacttacattgtgcatggacagggtatcgcaatcaggcagcaccgggtgatcctccaccagagaagcgcgggtctcggtctcctcacagcgtggtaagggggccggccgatacgggtgatggcgggacgcggctgatcgtgttcgcgaccgtgtcatgatgcagttgctttcggacattttcgtacttgctgtagcagaacctggtccgggcgctgcacaccgatcgccggcggcggtctcggcgcttggaacgctcggtgttgaaattgtaaaacagccactctctcagaccgtgcagcagatctagggcctcaggagtgatgaagatcccatcatgcctgatggctctgatcacatcgaccaccgtggaatgggccagacccagccagatgatgcaattttgttgggtttcggtgacggcgagcctcgggaacaacgatgaagtaaatgcaagcggtgcgttccagcatggttagttagctgatctgtagaaaaaacaaaaatgaacattaaaccatgctagcctggcgaacaggtgggtaaatcgttctctccagcaccaggcaggccacggggtctccggcgcgaccctcgtaaaaattgtcgctatgattgaaaaccatcacagagagacgttcccggtggccggcgtgaatgattcgacaagatgaatacacccccggaacattggcgtccgcgagtgaaaaaaagcgcccgaggaagcaataaggcactacaatgctcagtctcaagtccagcaaagcgatgccatgcggatgaagcacaaaattctcaggtgcgtacaaaatgtaattactcccctcctgcacaggcagcaaagcccccgatccctccaggtacacatacaaagcctcagcgtccatagcttaccgagcagcagcacacaacaggcgcaagagtcagagaaaggctgagctctaacctgtccacccgctctctgctcaatatatagcccagatctacactgacgtaaaggccaaagtctaaaaatacccgccaaataatcacacacgcccagcacacgcccagaaaccggtgacacactcaaaaaaatacgcgcacttcctcaaacgcccaaaactgccgtcatttccgggttcccacgctacgtcatcaaaacacgactttcaaattccgtcgaccgttaaaaacgtcacccgccccgcccctaacggtcgcccgtctctcagccaatcagcgccccgcatccccaaattcaaacacctcatttgcatattaacgcgcacaaaaagtttgaggtatattattgatgatg

SEQ ID NO: 29366-29512 - skipped (147 entries)

SEQ ID NO: 29513 - protein, 10 aa, synthetic construct
YLDSGIHYGA

SEQ ID NO: 29514 - protein, 8 aa, synthetic construct
TVRAATIL

SEQ ID NO: 29515 - protein, 9 aa, synthetic construct
TTAPPLSGK

SEQ ID NO: 29516 - protein, 9 aa, synthetic construct
ATAPSLSGK

SEQ ID NO: 29517 - protein, 9 aa, synthetic construct
VVGAVGVGK

SEQ ID NO: 29518 - protein, 10 aa, synthetic construct
ILDTAGREEY

SEQ ID NO: 29519 - protein, 9 aa, synthetic construct
YLDDRNTFL

SEQ ID NO: 29520 - protein, 448 aa, synthetic construct
QVQLVESGGGVVQPGRSLRLSCAASGFTFSSYTMHWVRQAPGKGLEWVTFISYDGNNKYYADSVKGRFTISRDNSKNTLYLQMNSLRAEDTAIYYCARTGWLGPFDYWGQGTLVTVSSASTKGPSVFPLAPSSKSTSGGTAALGCLVKDYFPEPVTVSWNSGALTSGVHTFPAVLQSSGLYSLSSVVTVPSSSLGTQTYICNVNHKPSNTKVDKRVEPKSCDKTHTCPPCPAPELLGGPSVFLFPPKPKDTLMISRTPEVTCVVVDVSHEDPEVKFNWYVDGVEVHNAKTKPREEQYNSTYRVVSVLTVLHQDWLNGKEYKCKVSNKALPAPIEKTISKAKGQPREPQVYTLPPSRDELTKNQVSLTCLVKGFYPSDIAVEWESNGQPENNYKTTPPVLDSDGSFFLYSKLTVDKSRWQQGNVFSCSVMHEALHNHYTQKSLSLSPGK

SEQ ID NO: 29521 - protein, 215 aa, synthetic construct
EIVLTQSPGTLSLSPGERATLSCRASQSVGSSYLAWYQQKPGQAPRLLIYGAFSRATGIPDRFSGSGSGTDFTLTISRLEPEDFAVYYCQQYGSSPWTFGQGTKVEIKRTVAAPSVFIFPPSDEQLKSGTASVVCLLNNFYPREAKVQWKVDNALQSGNSQESVTEQDSKDSTYSLSSTLTLSKADYEKHKVYACEVTHQGLSSPVTKSFNRGEC

SEQ ID NO: 29522 - protein, 440 aa, synthetic construct
QVQLVESGGGVVQPGRSLRLDCKASGITFSNSGMHWVRQAPGKGLEWVAVIWYDGSKRYYADSVKGRFTISRDNSKNTLFLQMNSLRAEDTAVYYCATNDDYWGQGTLVTVSSASTKGPSVFPLAPCSRSTSESTAALGCLVKDYFPEPVTVSWNSGALTSGVHTFPAVLQSSGLYSLSSVVTVPSSSLGTKTYTCNVDHKPSNTKVDKRVESKYGPPCPPCPAPEFLGGPSVFLFPPKPKDTLMISRTPEVTCVVVDVSQEDPEVQFNWYVDGVEVHNAKTKPREEQFNSTYRVVSVLTVLHQDWLNGKEYKCKVSNKGLPSSIEKTISKAKGQPREPQVYTLPPSQEEMTKNQVSLTCLVKGFYPSDIAVEWESNGQPENNYKTTPPVLDSDGSFFLYSRLTVDKSRWQEGNVFSCSVMHEALHNHYTQKSLSLSLGK

SEQ ID NO: 29523 - protein, 214 aa, synthetic construct
EIVLTQSPATLSLSPGERATLSCRASQSVSSYLAWYQQKPGQAPRLLIYDASNRATGIPARFSGSGSGTDFTLTISSLEPEDFAVYYCQQSSNWPRTFGQGTKVEIKRTVAAPSVFIFPPSDEQLKSGTASVVCLLNNFYPREAKVQWKVDNALQSGNSQESVTEQDSKDSTYSLSSTLTLSKADYEKHKVYACEVTHQGLSSPVTKSFNRGEC

SEQ ID NO: 29524 - protein, 5 aa, synthetic construct
GPGPG

SEQ ID NO: 29525 - protein, 4 aa, synthetic construct
  REGION >4: note = The amino acid residues can be repeated 5 to 10 times
GGGG

SEQ ID NO: 29526 - protein, 4 aa, synthetic construct
  REGION >4: note = The amino acid residues can be repeated 5 to 10 times
AAAA

SEQ ID NO: 29527 - RNA, 20 nt, synthetic construct
  source 1..20: mol_type = other RNA
  misc_feature >20: note = The nucleotides can be repeated 21 to 100 times
aaaaaaaaaaaaaaaaaaaa

What is claimed is:

1. A method for stimulating an immune response in a subject, the method comprising administering to the subject a composition for delivery of a self-replicating alphavirus-based expression system and administering to the subject a composition for delivery of a chimpanzee adenovirus (ChAdV)-based expression system, and
wherein the composition for delivery of the ChAdV-based expression system is administered as a priming dose and the composition for delivery of the self-replicating alphavirus-based expression system is administered as one or more boosting doses, wherein the expression systems encode at least one antigen-encoding nucleic acid sequence, and wherein the self-replicating alphavirus-based expression system and the chimpanzee adenovirus (ChAdV)-based expression system are administered as a maintenance therapy.

2. The method of claim 1, wherein the maintenance therapy comprises a combination therapy with chemotherapy, immune checkpoint inhibitor therapy, radiation therapy, or combinations thereof, optionally wherein the chemotherapy comprises fluoropyrimidine and/or bevacizumab.

3. A method for stimulating an immune response in a subject, the method comprising administering to the subject a composition for delivery of a self-replicating alphavirus-based expression system and administering to the subject a composition for delivery of a chimpanzee adenovirus (ChAdV)-based expression system, and
wherein the composition for delivery of the ChAdV-based expression system is administered as a priming dose and the composition for delivery of the self-replicating alphavirus-based expression system is administered as one or more boosting doses, wherein the expression systems encode at least one antigen-encoding nucleic acid sequence, and wherein the self-replicating alphavirus-based expression system and the chimpanzee adenovirus (ChAdV)-based expression system are administered as an adjuvant therapy.

4. The method of claim 4, wherein the adjuvant therapy comprises a combination therapy with chemotherapy, immune checkpoint inhibitor therapy, radiation therapy, or combinations thereof, optionally wherein the chemotherapy comprises fluoropyrimidine and/or bevacizumab.

5. A method for stimulating an immune response in a subject, the method comprising administering to the subject either (1) a composition for delivery of a self-replicating alphavirus-based expression system or (2) a composition for delivery of a chimpanzee adenovirus (ChAdV)-based expression system, and wherein the self-replicating alphavirus-based expression system or the chimpanzee adenovirus (ChAdV)-based expression system is administered as an adjuvant therapy, wherein the expression systems encode at least one antigen-encoding nucleic acid sequence, wherein the adjuvant therapy comprises a combination therapy with chemotherapy, immune checkpoint inhibitor therapy, radiation therapy, or combinations thereof, optionally wherein the chemotherapy comprises fluoropyrimidine and/or bevacizumab.

6. The method of claim 5, wherein one or more boosting doses of the composition for delivery of the self-replicating alphavirus-based expression system is administered.

7. The method of any one of claims 2-5, wherein the combination therapy comprises fluoropyrimidine and/or bevacizumab.

8. The method of any one of claims 2-5, wherein the combination therapy comprises fluoropyrimidine and bevacizumab.

9. The method of any one of claims 2-5, wherein the combination therapy comprises fluoropyrimidine, bevacizumab, and an immune checkpoint inhibitor therapy.

10. The method of claim 9, wherein the immune checkpoint inhibitor comprises (1) an anti-PD-1 antibody or an antigen-binding fragment thereof, (2) an anti-PD-L1 antibody or an antigen-binding fragment thereof, and/or (3) an anti-CTLA-4 antibody or an antigen-binding fragment thereof.

11. The method of claim 9 or 10, wherein the immune checkpoint inhibitor therapy comprises administration of an anti-CTLA-4 antibody or an antigen-binding fragment thereof only with the priming dose and the first boosting dose.

12. The method of claim 11, wherein the anti-CTLA-4 antibody comprises ipilimumab.

13. The method of claim 12, wherein the ipilimumab is administered at a dose of 30 mg subcutaneously.

14. The method of any one of claims 9-13, wherein the immune checkpoint inhibitor therapy comprises administration of an anti-PD-L1 antibody or an antigen-binding fragment thereof every 4 weeks (Q4W).

15. The method of claim 14, wherein the anti-PD-L1 antibody comprises atezolizumab or nivolumab.

16. The method of claim 15, wherein the atezolizumab is administered at a dose of 1680 mg intravenously or the nivolumab is administered at a dose of 480 mg intravenously.

17. The method of any one of claims 9-16, wherein the immune checkpoint inhibitor therapy comprises at least 2, 3, 4, 5, 6, 7, 8, 9, 10, 11, 12, or 13 administrations, optionally wherein the administration of the anti-PD-L1 antibody or an antigen-binding fragment thereof comprises at least 2, 3, 4, 5, 6, 7, 8, 9, 10, 11, 12, or 13 administrations.

18. The method of any one of claims 9-16, wherein the immune checkpoint inhibitor therapy comprises at least 13 administrations, optionally wherein the administration of the anti-PD-L1 antibody or an antigen-binding fragment thereof comprises at least 2, 3, 4, 5, 6, 7, 8, 9, 10, 11, 12, or 13 administrations.

19. The method of any one of the above claims, wherein the subject has previously undergone surgery to remove a tumor and/or cancerous tissue, chemotherapy, immunotherapy (e.g., immune checkpoint inhibitor therapy), radiation therapy, or combinations thereof.

20. The method of claim 19, wherein the prior chemotherapy comprises oxaliplatin, fluoropyrimidine, and/or bevacizumab.

21. The method of claim 19, wherein the prior chemotherapy comprises oxaliplatin, fluoropyrimidine, and bevacizumab.

22. The method of any one of claims 19-22, wherein the prior chemotherapy was administered for up to 24 weeks prior to administration of the maintenance therapy.

23. The method of any one of the above claims, wherein the subject has colorectal cancer (CRC).

24. The method of claim 23, wherein the CRC is classified as Stage IV, microsatellite-stable, and BRAF^{wt}.

25. The method of claim 23, wherein the CRC is classified as Stage II or III.

26. The method of any one of the above claims, wherein the subject is classified as ctDNA positive.

27. The method of any one of the above claims, wherein two or more boosting doses are administered.

28. The method of any one of the above claims, wherein 1, 2, 3, 4, 5, 6, 7, or 8 boosting doses are administered.

29. The method of any one of the above claims, wherein the ChAdV-based expression system is further administered as a boosting dose.

30. The method of claim 29, wherein the ChAdV-based boosting dose is only administered as a single boosting dose.

31. The method of claim 29 or 30, wherein the ChAdV-based expression system is administered as the boosting dose on or about day 140 after the priming dose of the ChAdV-based expression system.

32. The method of claim 29 or 30, wherein the ChAdV-based expression system is administered as the boosting dose on or about week 20 after the priming dose of the ChAdV-based expression system.

33. The method of claim 29 or 30, wherein the ChAdV-based expression system is administered as the boosting dose on or about month 5 after the priming dose of the ChAdV-based expression system.

34. The method of claim 29 or 30, wherein the ChAdV-based expression system is administered as the boosting dose on or after day 140 after the priming dose of the ChAdV-based expression system.

35. The method of claim 29 or 30, wherein the ChAdV-based expression system is administered as the boosting dose on or after week 20 after the priming dose of the ChAdV-based expression system.

36. The method of claim 29 or 30, wherein the ChAdV-based expression system is administered as the boosting dose on or after month 5 after the priming dose of the ChAdV-based expression system.

37. The method of any one of the above method claims, wherein the composition for delivery of the ChAdV-based expression system is administered intramuscularly (IM), intradermally (ID), subcutaneously (SC), or intravenously (IV).

38. The method of any one of the above method claims, wherein the composition for delivery of the ChAdV-based expression system is administered (IM).

39. The method of claim 38, wherein the IM administration is administered at separate injection sites.

40. The method of claim 39, wherein the separate injection sites are in opposing deltoid muscles.

41. The method of claim 39, wherein the separate injection sites are in gluteus or rectus femoris sites on each side.

42. The method of any one of the above claims, wherein the composition for delivery of the self-replicating alphavirus-based expression system is administered intramuscularly (IM), intradermally (ID), subcutaneously (SC), or intravenously (IV).

43. The method of any one of the above claims, wherein the self-replicating alphavirus-based expression system is administered as at least two boosting doses.

44. The method of any one of the above claims, wherein the self-replicating alphavirus-based expression system is administered as at least two or more boosting doses at least 28 days apart.

45. The method of any one of the above claims, wherein the self-replicating alphavirus-based expression system is administered as at least two or more boosting doses at least 4 weeks (Q4W) apart.

46. The method of any one of the above claims, wherein the self-replicating alphavirus-based expression system is administered as at least two or more boosting doses at least one month apart.

47. The method of any one of the above claims, wherein the self-replicating alphavirus-based expression system is administered as at least two or more boosting doses at least 56 days apart.

48. The method of any one of the above claims, wherein the self-replicating alphavirus-based expression system is administered as at least two or more boosting doses at least 8 weeks (Q8W) apart.

49. The method of any one of the above claims, wherein the self-replicating alphavirus-based expression system is administered as at least two or more boosting doses at least 2 months apart.

50. The method of any one of the above claims, wherein the self-replicating alphavirus-based expression system is administered as at least two boosting doses on or about days 28 and 84 after the priming dose of the ChAdV-based expression system.

51. The method of any one of the above claims, wherein the self-replicating alphavirus-based expression system is administered as at least two boosting doses on or about weeks 4 and 12 after the priming dose of the ChAdV-based expression system.

52. The method of any one of the above claims, wherein the self-replicating alphavirus-based expression system is administered as at least two boosting doses on or about months 1 and 3 after the priming dose of the ChAdV-based expression system.

53. The method of any one of the above claims, wherein the self-replicating alphavirus-based expression system is administered as at least four boosting doses.

54. The method of claim 53, wherein the self-replicating alphavirus-based expression system is administered on or about days 28, 84, 224, and 308 relative to the priming dose of the ChAdV-based expression system.

55. The method of claim 53, wherein the self-replicating alphavirus-based expression system is administered on or about weeks 4, 12, 32, and 44 relative to the priming dose of the ChAdV-based expression system.

56. The method of claim 53, wherein the self-replicating alphavirus-based expression system is administered on or about months 1, 3, 8, and 11 relative to the priming dose of the ChAdV-based expression system.

57. The method of any one of the above claims, wherein the composition for delivery of the self-replicating alphavirus-based expression system is administered (IM).

58. The method of claim 57, wherein the IM administration is administered at separate injection sites.

59. The method of claim 58, wherein the separate injection sites are in opposing deltoid muscles.

60. The method of claim 58, wherein the separate injection sites are in gluteus or rectus femoris sites on each side.

61. The method of any one of claims 57-60, wherein the injection site of the one or more boosting doses is as close as possible to the injection site of the priming dose.

62. The method of any one of the above method claims, further comprising determining or having determined the HLA-haplotype of the subject.

63. Any one of the above method or composition claims, wherein the stimulating the immune response comprises stimulating a molecular response.

64. The method or composition of claim 63, wherein the molecular response comprises a reduction in ctDNA.

65. The method or composition of claim 64, wherein the reduction in ctDNA is at least a 20%, at least a 30%, at least a 40%, or at least a 50% reduction in ctDNA.

66. The method or composition of claim 64, wherein the reduction in ctDNA is at least a 30% reduction in ctDNA.

67. The method or composition of claim 64, wherein the reduction in ctDNA is at least a 50% reduction in ctDNA.

68. The method of any one of the above claims, wherein the at least one antigen-encoding nucleic acid sequence comprises subject-specific neoantigen-encoding nucleic acid sequences.

69. The method of any one of the above claims, wherein the at least one antigen-encoding nucleic acid sequence comprises 20 subject-specific neoantigen-encoding nucleic acid sequences.

70. The method of any one of the above claims, wherein the composition for delivery of the self-replicating alphavirus-based expression system comprises:
(A) the self-replicating alphavirus-based expression system, wherein the self-replicating alphavirus-based expression system comprises one or more vectors, wherein the one or more vectors comprises:
(a) an RNA alphavirus backbone, wherein the RNA alphavirus backbone comprises:
(i) at least one promoter nucleotide sequence, and
(ii) at least one polyadenylation (poly(A)) sequence; and
(b) a cassette, wherein the cassette comprises:
(i) at least one antigen-encoding nucleic acid sequence comprising:
a. an epitope-encoding nucleic acid sequence, optionally comprising at least one alteration that makes the encoded epitope sequence distinct from the corresponding peptide sequence encoded by a wild-type nucleic acid sequence,
b. optionally a 5′ linker sequence, and
c. optionally a 3′ linker sequence;
(ii) optionally, a second promoter nucleotide sequence operably linked to the at least one antigen-encoding nucleic acid sequence; and
(iii) optionally, at least one second poly(A) sequence, wherein the second poly(A) sequence is a native poly(A) sequence or an exogenous poly(A) sequence to the alphavirus, and
(B) a lipid-nanoparticle (LNP), wherein the LNP encapsulates the self-replicating alphavirus-based expression system.

71. The method of any of the above claims, wherein the cassette of the composition for delivery of the ChAdV-based expression system is identical to the cassette of the composition for delivery of the self-replicating alphavirus-based expression system.

72. The method of any of the above claims, wherein the cassette of the composition for delivery of the self-replicating alphavirus-based expression system for each of the doses is identical.

73. The method of any one of the above claims, wherein the self-replicating alphavirus-based expression system comprises an alphavirus backbone comprising a Venezuelan equine encephalitis virus comprising the sequence of SEQ ID NO:3 or SEQ ID NO:5 except for lacking nucletices 7544 and 11175.

74. The method of claim 73, wherein the RNA alphavirus backbone comprises the sequence set forth in SEQ ID NO:6 or SEQ ID NO:7.

75. The method of claim 73 or 74, wherein the cassette is inserted at position 7544 to replace the deletion between base pairs 7544 and 11175 as set forth in the sequence of SEQ ID NO:3 or SEQ ID NO:5.

76. The method of any one of the above method claims, wherein the ChAdV vector comprises:
(a) an ChAdV backbone, wherein the ChAdV backbone comprises:
(i) at least one promoter nucleotide sequence, and
(ii) at least one polyadenylation (poly(A)) sequence; and
(b) a cassette, wherein the cassette comprises:
(i) at least one antigen-encoding nucleic acid sequence comprising:
a. an epitope-encoding nucleic acid sequence, optionally comprising at least one alteration that makes the encoded epitope sequence distinct from the corresponding peptide sequence encoded by a wild-type nucleic acid sequence,
b. optionally a 5′ linker sequence, and
c. optionally a 3′ linker sequence; and
wherein the cassette is operably linked to the at least one promoter nucleotide sequence and the at least one poly(A) sequence.

77. The method of any one of the above method claims, wherein the ChAdV-based expression system comprises a ChAdV68 vector backbone, wherein the ChAdV68 vector backbone comprises at least nucleotides 2 to 36,518 of the sequence set forth in SEQ ID NO:1, except for lacking: (1) nucleotides 577 to 3403 of the sequence shown in SEQ ID NO:1 corresponding to an E1 deletion, (2) nucleotides 27,125 to 31,825 of the sequence shown in SEQ ID NO:1 corresponding to an E3 deletion, and optionally (3) nucleotides 34,916 to 35,642 corresponding to a partially deleted E4 gene of ChAdV68.

78. The method of claim 77, wherein the cassette is inserted in the ChAdV backbone at the E1 region, E3 region, and/or any deleted AdV region that allows incorporation of the cassette.

79. The method of any one of the above method claims, wherein the epitope-encoding nucleic acid sequence comprises at least one alteration that makes the encoded epitope have increased binding affinity to its corresponding MHC allele relative to the translated, corresponding wild-type nucleic acid sequence.

80. The method of any one of the above method claims, wherein the epitope-encoding nucleic acid sequence comprises at least one alteration that makes the encoded epitope have increased binding stability to its corresponding MHC allele relative to the translated, corresponding wild-type nucleic acid sequence.

81. The method of any one of the above method claims, wherein the epitope-encoding nucleic acid sequence comprises at least one alteration that makes the encoded epitope have an increased likelihood of presentation on its corresponding MHC allele relative to the translated, corresponding wild-type nucleic acid sequence.

82. The method of any one of the above method claims, wherein the at least one alteration comprises a point mutation, a frameshift mutation, a non-frameshift mutation, a deletion mutation, an insertion mutation, a splice variant, a genomic rearrangement, or a proteasome-generated spliced antigen.

83. The method of any one of the above method claims, wherein the epitope-encoding nucleic acid sequence encodes an epitope known or suspected to be expressed in the subject known or suspected to have cancer.

84. The method of claim 83, wherein the cancer comprises a solid tumor.

85. The method of claim 83 or 84, wherein the cancer is selected from the group consisting of: lung cancer, melanoma, breast cancer, ovarian cancer, prostate cancer, kidney cancer, gastric cancer, colon cancer, testicular cancer, head and neck cancer, pancreatic cancer, bladder cancer, brain cancer, B-cell lymphoma, acute myelogenous leukemia, adult acute lymphoblastic leukemia, chronic myelogenous leukemia, chronic lymphocytic leukemia, T cell lymphocytic leukemia, non-small cell lung cancer, and small cell lung cancer.

86. The method of any one of the above method claims, wherein the at least one antigen-encoding nucleic acid sequence comprises at least 2-10, 2, 3, 4, 5, 6, 7, 8, 9, or 10 antigen-encoding nucleic acid sequences, optionally wherein each antigen-encoding nucleic acid sequence encodes a distinct antigen-encoding nucleic acid sequence.

87. The method of any one of the above method claims, wherein the at least one antigen-encoding nucleic acid sequence comprises at least 11-20, 15-20, 11-100, 11-200, 11-300, 11-400, 11, 12, 13, 14, 15, 16, 17, 18, 19, 20 or up to 400 antigen-encoding nucleic acid sequences, optionally wherein each antigen-encoding nucleic acid sequence encodes a distinct antigen-encoding nucleic acid sequence.

88. The method of any one of the above method claims, wherein the at least one antigen-encoding nucleic acid sequence comprises at least 11-20, 15-20, 11-100, 11-200, 11-300, 11-400, 11, 12, 13, 14, 15, 16, 17, 18, 19, 20 or up to 400 antigen-encoding nucleic acid sequences.

89. The method of any of the above claims, wherein the cassette comprises junctional epitope sequences formed by adjacent sequences in the cassette, wherein at least one or each junctional epitope sequence has an affinity of greater than 500 nM for MHC and/or each junctional epitope sequence is non-self.

90. The method of any of the above claims, wherein the cassette does not encode a non-therapeutic MHC class I or class II epitope nucleic acid sequence comprising a translated, wild-type nucleic acid sequence, wherein the non-therapeutic epitope is predicted to be displayed on an MHC allele of the subject.

91. The method of claim 90, wherein the non-therapeutic predicted MHC class I or class II epitope sequence is a junctional epitope sequence formed by adjacent sequences in the cassette.

92. The method of claims 89-91, wherein the prediction is based on presentation likelihoods generated by inputting sequences of the non-therapeutic epitopes into a presentation model.

93. The method of any of the above claims, wherein the composition for delivery of the ChAdV-based expression system is formulated in a pharmaceutical composition comprising a pharmaceutically acceptable carrier.

94. The method of any of the above claims, wherein one or more of the epitope-encoding nucleic acid sequences are derived from a tumor of the subject.

95. The method of any of the above claims, wherein each of the epitope-encoding nucleic acid sequences are derived from a tumor of the subject.

96. The method of any of the above claims, wherein one or more of the epitope-encoding nucleic acid sequences are not derived from a tumor of the subject.

97. The method of any of the above claims, wherein each of the epitope-encoding nucleic acid sequences are not derived from a tumor of the subject.

98. The method of any of the above claims, wherein the epitope-encoding nucleic acid sequence comprises an epitope selected from the group consisting of SEQ ID NO: 57-29,364.
